(19) United States
(12) Patent Application Publication
(10) Pub. No.: US 2026/0125711 A1
(43) Pub. Date: May 7, 2026

(54) RNA-GUIDED NUCLEASES AND ACTIVE FRAGMENTS AND VARIANTS THEREOF AND METHODS OF USE

(71) Applicant: Life Edit Therapeutics, Inc., Durham, NC (US)

(72) Inventors: Alexandra Briner Crawley, Cary, NC (US); Michael Coyle, Chapel Hill, NC (US); Gunjan H. Arya, Cary, NC (US); Lisle Mose, Raleigh, NC (US)

(73) Assignee: Life Edit Therapeutics, Inc., Durham, NC (US)

(21) Appl. No.: 19/103,133

(22) PCT Filed: Aug. 12, 2023
(86) PCT No.: PCT/IB2023/058160

§ 371 Date: Feb. 11, 2025

Related U.S. Application Data
(60) Provisional application No. 63/371,230, filed on Aug. 12, 2022.

(51) Int. Cl. C12N 15/90; C12N 9/22; C12N 15/11; C12N 15/88

(52) U.S. Cl. CPC C12N 15/907; C12N 9/226; C12N 15/11; C12N 15/88; C12N 2310/20; C12N 2800/22

(57) ABSTRACT

Compositions and methods for binding to a target sequence of interest are provided. The compositions find use in cleaving or modifying a target sequence of interest, visualization of a target sequence of interest, and modifying the expression of a sequence of interest. Compositions comprise RNA-guided nuclease (RGN) polypeptides, CRISPR RNAs, trans-activating CRISPR RNAs, guide RNAs, and nucleic acid molecules encoding the same. Vectors and host cells comprising the nucleic acid molecules are also provided. Further provided are RGN systems for binding a target sequence of interest, wherein the RGN system comprises an RNA-guided nuclease polypeptide and one or more guide RNAs.

### CROSS-REFERENCE TO RELATED APPLICATION

[0001] This application claims priority to US Provisional Patent Application Nos. 63/371,230, filed Aug. 12, 2022, which is fully incorporated by reference herein.

### REFERENCE TO A SEQUENCE LISTING SUBMITTED ELECTRONICALLY AS AN XML FILE

[0002] The instant application contains a Sequence Listing which has been submitted in xml format via USPTO Patent Center and is hereby incorporated by reference in its entirety. Said xml copy, created on Dec. 22, 2025, is named L103438_1310WO_Seq_List.xml, and is 1,573,029 bytes in size.

### FIELD OF THE INVENTION

[0003] The present invention relates to the field of molecular biology and gene editing.

### BACKGROUND OF THE INVENTION

[0004] Targeted genome editing or modification is rapidly becoming an important tool for basic and applied research. Initial methods involved engineering nucleases such as meganucleases, zinc finger fusion proteins or TALENs, requiring the generation of chimeric nucleases with engineered, programmable, sequence-specific DNA-binding domains specific for each particular target sequence. RNA-guided nucleases, such as the Clustered Regularly Interspaced Short Palindromic Repeats (CRISPR)-associated (Cas) proteins of the CRISPR-Cas bacterial system, allow for the targeting of specific sequences by complexing the nucleases with guide RNA that specifically hybridizes with a particular target sequence. Producing target-specific guide RNAs is less costly and more efficient than generating chimeric nucleases for each target sequence. Such RNA-guided nucleases can be used to edit genomes optionally through the introduction of a sequence-specific, double-stranded break that is repaired via error-prone non-homologous end-joining (NHEJ) to introduce a mutation at a specific genomic location. Alternatively, heterologous DNA may be introduced into the genomic site via homology-directed repair. RNA-guided nucleases (RGNs) can also be used for base editing when fused with a deaminase.

### BRIEF SUMMARY OF THE INVENTION

[0005] Compositions and methods for binding a target sequence of interest in a target nucleic acid molecule are provided. The compositions find use in cleaving or modifying a target nucleic acid molecule of interest, detection of a target sequence of interest, and modifying the expression of a gene of interest comprising a target sequence. Compositions comprise RNA-guided nuclease (RGN) polypeptides, CRISPR RNAs (crRNAs), trans-activating CRISPR RNAs (tracrRNAs), guide RNAs (gRNAs) such as single guide RNAs (sgRNAs), nucleic acid molecules encoding the same, compositions comprising the same, and vectors and host cells comprising the nucleic acid molecules. Also provided are RGN systems and ribonucleoprotein complexes for binding a target sequence of interest, wherein the RGN system and ribonucleoprotein complex comprises an RNA-guided nuclease polypeptide and one or more guide RNAs. Thus, methods disclosed herein are drawn to binding a target sequence of interest in a target nucleic acid molecule, and in some embodiments, cleaving or modifying the target nucleic acid molecule of interest. The target nucleic acid molecule of interest can be modified, for example, as a result of non-homologous end joining, homology-directed repair with an introduced donor sequence, or base editing.

[0006] In one aspect, the present disclosure provides a nucleic acid molecule comprising a polynucleotide encoding an RNA-guided nuclease (RGN) polypeptide, wherein the polynucleotide comprises a nucleotide sequence encoding an RGN polypeptide comprising an amino acid sequence having at least 90% sequence identity to any one of SEQ ID NOs:1-20.

[0007] In some embodiments of the above aspect, the RGN polypeptide is capable of binding a target sequence in a target nucleic acid molecule, wherein the target sequence comprises a target strand and a non-target strand, in an RNA-guided sequence specific manner when bound to a guide RNA (gRNA) capable of hybridizing to the non-target strand of the target sequence.

[0008] In some embodiments of the above aspect, the polynucleotide encoding an RGN polypeptide is operably linked to a promoter heterologous to the polynucleotide.

[0009] In some embodiments of the above aspect, the RGN polypeptide comprises an amino acid sequence having at least 95% sequence identity to any one of SEQ ID NOs:1-20. In some embodiments, the RGN polypeptide comprises an amino acid sequence having 100% sequence identity to any one of SEQ ID NOs: 1-20.

[0010] In some embodiments of the above aspect, the RGN polypeptide is capable of cleaving the target nucleic acid molecule upon binding. In some embodiments, the RGN polypeptide is capable of generating a double-stranded break. In some embodiments, the RGN polypeptide is capable of generating a single-stranded break.

[0011] In some embodiments of the above aspect, the RGN polypeptide is nuclease inactive or is a nickase.

[0012] In some embodiments of the above aspect, the RGN polypeptide is operably fused to a base-editing polypeptide. In some embodiments, the base-editing polypeptide is a deaminase, such as a cytosine deaminase or an adenine deaminase. In some embodiments, the deaminase has at least 90% or 100% sequence identity to an amino acid sequence of any one of SEQ ID NOs: 481-552.

[0013] In some embodiments of the above aspect, the RGN polypeptide comprises one or more nuclear localization signals.

[0014] In some embodiments of the above aspect, the RGN polypeptide is codon optimized for expression in a eukaryotic cell.

[0015] In some embodiments of the above aspect, the target sequence is located adjacent to a protospacer adjacent motif (PAM).

[0016] In another aspect, the present disclosure provides a vector comprising a nucleic acid molecule as described hereinabove.

[0017] In some embodiments of the above aspect, the vector further comprises at least one nucleotide sequence encoding the gRNA capable of hybridizing to the non-target strand of the target sequence.

[0018] In some embodiments of the above aspect, the guide RNA is selected from the group consisting of: a) a guide RNA comprising: i) a CRISPR RNA comprising a CRISPR repeat sequence having at least 90% sequence identity to SEQ ID NO: 21; and ii) a tracrRNA having at least 90%, at least 95%, or 100% sequence identity to SEQ ID NO: 42; wherein the RGN polypeptide comprises an amino acid sequence having at least 90%, at least 95%, or 100% sequence identity to SEQ ID NO: 1; b) a guide RNA comprising: i) a CRISPR RNA comprising a CRISPR repeat sequence having at least 90%, at least 95%, or 100% sequence identity to SEQ ID NO: 22; and ii) a tracrRNA having at least 90%, at least 95%, or 100% sequence identity to SEQ ID NO: 43; wherein the RGN polypeptide comprises an amino acid sequence having at least 90%, at least 95%, or 100% sequence identity to SEQ ID NO: 2; c) a guide RNA comprising: i) a CRISPR RNA comprising a CRISPR repeat sequence having at least 90%, at least 95%, or 100% sequence identity to SEQ ID NO: 23; and ii) a tracrRNA having at least 90%, at least 95%, or 100% sequence identity to SEQ ID NO: 44 or nucleotides 19-111 of SEQ ID NO: 1040; wherein the RGN polypeptide comprises an amino acid sequence having at least 90%, at least 95%, or 100% sequence identity to SEQ ID NO: 3; d) a guide RNA comprising: i) a CRISPR RNA comprising a CRISPR repeat sequence having at least 90%, at least 95%, or 100% sequence identity to SEQ ID NO: 24; and ii) a tracrRNA having at least 90%, at least 95%, or 100% sequence identity to SEQ ID NO: 45; wherein the RGN polypeptide comprises an amino acid sequence having at least 90%, at least 95%, or 100% sequence identity to SEQ ID NO: 4; e) a guide RNA comprising: i) a CRISPR RNA comprising a CRISPR repeat sequence having at least 90%, at least 95%, or 100% sequence identity to SEQ ID NO: 25 or nucleotides 1-17 of SEQ ID NO: 1041 or 1042; and ii) a tracrRNA having at least 90%, at least 95%, or 100% sequence identity to SEQ ID NO: 46 or nucleotides 22-85 of SEQ ID NO: 1041 or 1042; wherein the RGN polypeptide comprises an amino acid sequence having at least 90%, at least 95%, or 100% sequence identity to SEQ ID NO: 5; a guide RNA comprising: i) a CRISPR RNA comprising a CRISPR repeat sequence having at least 90%, at least 95%, or 100% sequence identity to SEQ ID NO: 26; and ii) a tracrRNA having at least 90%, at least 95%, or 100% sequence identity to SEQ ID NO: 47 or nucleotides 24-138 of SEQ ID NO: 1043; wherein the RGN polypeptide comprises an amino acid sequence having at least 90%, at least 95%, or 100% sequence identity to SEQ ID NO: 6; g) a guide RNA comprising: i) a CRISPR RNA comprising a CRISPR repeat sequence having at least 90%, at least 95%, or 100% sequence identity to SEQ ID NO: 27 or nucleotides 1-22 of SEQ ID NO: 1044 or 1045; and ii) a tracrRNA having at least 90%, at least 95%, or 100% sequence identity to SEQ ID NO: 48 or nucleotides 27-96 of SEQ ID NO 1044 or nucleotides 27-95 of SEQ ID NO: 1045; wherein the RGN polypeptide comprises an amino acid sequence having at least 90%, at least 95%, or 100% sequence identity to SEQ ID NO: 7; h) a guide RNA comprising: i) a CRISPR RNA comprising a CRISPR repeat sequence having at least 90%, at least 95%, or 100% sequence identity to SEQ ID NO: 28; and ii) a tracrRNA having at least 90%, at least 95%, or 100% sequence identity to SEQ ID NO: 49; wherein the RGN polypeptide comprises an amino acid sequence having at least 90%, at least 95%, or 100% sequence identity to SEQ ID NO: 8; i) a guide RNA comprising: i) a CRISPR RNA comprising a CRISPR repeat sequence having at least 90%, at least 95%, or 100% sequence identity to SEQ ID NO: 29; and ii) a tracrRNA having at least 90%, at least 95%, or 100% sequence identity to SEQ ID NO: 50; wherein the RGN polypeptide comprises an amino acid sequence having at least 90%, at least 95%, or 100% sequence identity to SEQ ID NO: 9; j) a guide RNA comprising: i) a CRISPR RNA comprising a CRISPR repeat sequence having at least 90%, at least 95%, or 100% sequence identity to SEQ ID NO: 30; and ii) a tracrRNA having at least 90%, at least 95%, or 100% sequence identity to SEQ ID NO: 51; wherein the RGN polypeptide comprises an amino acid sequence having at least 90%, at least 95%, or 100% sequence identity to SEQ ID NO: 10; k) a guide RNA comprising: i) a CRISPR RNA comprising a CRISPR repeat sequence having at least 90%, at least 95%, or 100% sequence identity to SEQ ID NO: 31; and ii) a tracrRNA having at least 90%, at least 95%, or 100% sequence identity to SEQ ID NO: 52; wherein the RGN polypeptide comprises an amino acid sequence having at least 90%, at least 95%, or 100% sequence identity to SEQ ID NO: 11; l) a guide RNA comprising: i) a CRISPR RNA comprising a CRISPR repeat sequence having at least 90%, at least 95%, or 100% sequence identity to SEQ ID NO: 32; and ii) a tracrRNA having at least 90%, at least 95%, or 100% sequence identity to SEQ ID NO: 53; wherein the RGN polypeptide comprises an amino acid sequence having at least 90%, at least 95%, or 100% sequence identity to SEQ ID NO: 12; m) a guide RNA comprising: i) a CRISPR RNA comprising a CRISPR repeat sequence having at least 90%, at least 95%, or 100% sequence identity to SEQ ID NO: 33; and ii) a tracrRNA having at least 90%, at least 95%, or 100% sequence identity to SEQ ID NO: 54; wherein the RGN polypeptide comprises an amino acid sequence having at least 90%, at least 95%, or 100% sequence identity to SEQ ID NO: 13; n) a guide RNA comprising: i) a CRISPR RNA comprising a CRISPR repeat sequence having at least 90%, at least 95%, or 100% sequence identity to SEQ ID NO: 34; and ii) a tracrRNA having at least 90%, at least 95%, or 100% sequence identity to SEQ ID NO: 55; wherein the RGN polypeptide comprises an amino acid sequence having at least 90%, at least 95%, or 100% sequence identity to SEQ ID NO: 14; o) a guide RNA comprising: i) a CRISPR RNA comprising a CRISPR repeat sequence having at least 90%, at least 95%, or 100% sequence identity to SEQ ID NO: 35; and ii) a tracrRNA having at least 90%, at least 95%, or 100% sequence identity to SEQ ID NO: 56; wherein the RGN polypeptide comprises an amino acid sequence having at least 90%, at least 95%, or 100% sequence identity to SEQ ID NO: 15; p) a guide RNA comprising: i) a CRISPR RNA comprising a CRISPR repeat sequence having at least 90%, at least 95%, or 100% sequence identity to SEQ ID NO: 36; and ii) a tracrRNA having at least 90%, at least 95%, or 100% sequence identity to SEQ ID NO: 57; wherein the RGN polypeptide comprises an amino acid sequence having at least 90%, at least 95%, or 100% sequence identity to SEQ ID NO: 16; q) a guide RNA comprising: i) a CRISPR RNA comprising a CRISPR repeat sequence having at least 90%, at least 95%, or 100% sequence identity to SEQ ID NO: 37; and ii) a tracrRNA having at least 90%, at least 95%, or 100% sequence identity to SEQ ID NO: 58; wherein the RGN polypeptide comprises an amino acid sequence having at least 90%, at least 95%, or 100% sequence identity to SEQ ID NO: 17; r) a guide RNA comprising: i) a CRISPR RNA comprising a CRISPR repeat sequence having at least 90%, at least 95%, or 100% sequence identity to SEQ ID NO: 38 or 39; and ii) a tracrRNA having at least 90%, at least 95%, or 100% sequence identity to SEQ ID NO: 59 or 60; wherein the RGN polypeptide comprises an amino acid sequence having at least 90%, at least 95%, or 100% sequence identity to SEQ ID NO: 18; s) a guide RNA comprising: i) a CRISPR RNA comprising a CRISPR repeat sequence having at least 90%, at least 95%, or 100% sequence identity to SEQ ID NO: 40; and ii) a tracrRNA having at least 90%, at least 95%, or 100% sequence identity to SEQ ID NO: 61; wherein the RGN polypeptide comprises an amino acid sequence having at least 90%, at least 95%, or 100% sequence identity to SEQ ID NO: 19; and t) a guide RNA comprising: i) a CRISPR RNA comprising a CRISPR repeat sequence having at least 90%, at least 95%, or 100% sequence identity to SEQ ID NO: 41; and ii) a tracrRNA having at least 90%, at least 95%, or 100% sequence identity to SEQ ID NO: 62; wherein the RGN polypeptide comprises an amino acid sequence having at least 90%, at least 95%, or 100% sequence identity to SEQ ID NO: 20.

[0019] In some embodiments of the above aspect, the gRNA is a single guide RNA. In some embodiments of the above aspect, the gRNA is a dual-guide RNA.

[0020] In another aspect, the present disclosure provides a cell comprising a nucleic acid molecule or vector described hereinabove. In some embodiments, the cell is a prokaryotic cell. In some embodiments, the cell is a eukaryotic cell. In some embodiments, the eukaryotic cell is a mammalian cell. In some embodiments, the mammalian cell is a human cell. In some embodiments, the human cell is an immune cell. In some embodiments, the immune cell is a stem cell. In some embodiments, the stem cell is an induced pluripotent stem cell. In some embodiments, the eukaryotic cell is an insect or avian cell. In some embodiments, the eukaryotic cell is a fungal cell. In some embodiments, the eukaryotic cell is a plant cell.

[0021] In another aspect, the present disclosure provides a plant or a seed comprising a plant cell described hereinabove.

[0022] In another aspect, the present disclosure provides a method for making an RGN polypeptide comprising culturing a cell described hereinabove under conditions in which the RGN polypeptide is expressed.

[0023] In another aspect, the present disclosure provides a method for making an RGN polypeptide comprising introducing into a cell a heterologous nucleic acid molecule comprising a nucleotide sequence encoding an RNA-guided nuclease (RGN) polypeptide comprising an amino acid sequence having at least 90% sequence identity to any one of SEQ ID NOs: 1-20; and culturing the cell under conditions in which the RGN polypeptide is expressed.

[0024] In some embodiments of the above aspect, the RGN polypeptide is capable of binding a target sequence in a target nucleic acid molecule, wherein the target sequence comprises a target strand and a non-target strand, in an RNA-guided sequence specific manner when bound to a guide RNA (gRNA) capable of hybridizing to the non-target strand of the target sequence.

[0025] In some embodiments of the above aspect, the RGN polypeptide comprises an amino acid sequence having at least 95% or 100% sequence identity to any one of SEQ ID NOs: 1-20.

[0026] In some embodiments of the above aspect, the method further comprises purifying the RGN polypeptide.

[0027] In some embodiments of the above aspect, the cell further expresses one or more guide RNAs capable of binding to the RGN polypeptide to form an RGN ribonucleoprotein complex. In some embodiments, the method further comprises purifying the RGN ribonucleoprotein complex.

[0028] In another aspect, the present disclosure provides an RNA-guided nuclease (RGN) polypeptide comprising an amino acid sequence having at least 90% sequence identity to any one of SEQ ID NOs: 1-20.

[0029] In some embodiments of the above aspect, the RGN polypeptide is capable of binding a target sequence in a target nucleic acid molecule, wherein the target sequence comprises a target strand and a non-target strand, in an RNA-guided sequence specific manner when bound to a guide RNA (gRNA) capable of hybridizing to the non-target strand of the target sequence.

[0030] In some embodiments of the above aspect, the RGN polypeptide comprises an amino acid sequence having at least 95% or 100% sequence identity to any one of SEQ ID NOs: 1-20.

[0031] In some embodiments of the above aspect, the RGN polypeptide is an isolated RGN polypeptide.

[0032] In some embodiments of the above aspect, the RGN polypeptide is capable of cleaving the target nucleic acid molecule upon binding. In some embodiments, cleavage by the RGN polypeptide generates a double-stranded break. In some embodiments, cleavage by the RGN polypeptide generates a single-stranded break.

[0033] In some embodiments of the above aspect, the RGN polypeptide is nuclease inactive or a nickase.

[0034] In some embodiments of the above aspect, the RGN polypeptide is operably fused to a base-editing polypeptide. In some embodiments, the base-editing polypeptide is a deaminase. In some embodiments, the deaminase is a cytosine deaminase or an adenine deaminase. In some embodiments, the deaminase has at least 90%, at least 95%, or 100% sequence identity to an amino acid sequence of any one of SEQ ID NOs: 481-552.

[0035] In some embodiments of the above aspect, the target sequence is located adjacent to a protospacer adjacent motif (PAM).

[0036] In some embodiments of the above aspect, the RGN polypeptide comprises one or more nuclear localization signals.

[0037] In another aspect, the present disclosure provides a ribonucleoprotein (RNP) complex comprising an RGN polypeptide described hereinabove and a guide RNA bound to the RGN polypeptide.

[0038] In another aspect, the present disclosure provides a nucleic acid molecule comprising a CRISPR RNA (crRNA) or a polynucleotide encoding a crRNA, wherein the crRNA comprises a spacer and a CRISPR repeat, wherein the CRISPR repeat comprises a nucleotide sequence having at least 90% sequence identity to any one of SEQ ID NOs: 21-41, or nucleotides 1-17 of SEQ ID NO: 1041 or 1042, or nucleotides 1-22 of SEQ ID NO: 1044 or 1045.

[0039] In some embodiments of the above aspect, a guide RNA comprising the crRNA and a trans-activating CRISPR RNA (tracrRNA) hybridized to the CRISPR repeat of the crRNA is capable of hybridizing to the non-target strand of a target sequence in a target nucleic acid molecule in a sequence specific manner through the spacer of the crRNA when the guide RNA is bound to an RNA-guided nuclease (RGN) polypeptide.

[0040] In some embodiments of the above aspect, the polynucleotide encoding a crRNA is operably linked to a promoter heterologous to the polynucleotide.

[0041] In some embodiments of the above aspect, the CRISPR repeat comprises a nucleotide sequence having at least 95% or 100% sequence identity to any one of SEQ ID NOs: 21-41, or nucleotides 1-17 of SEQ ID NO: 1041 or 1042, or nucleotides 1-22 of SEQ ID NO: 1044 or 1045.

[0042] In another aspect, the present disclosure provides a vector comprising a nucleic acid molecule comprising a polynucleotide encoding a crRNA described hereinabove.

[0043] In some embodiments of the above aspect, the vector further comprises a polynucleotide encoding the tracrRNA. In some embodiments, the tracrRNA is selected from the group consisting of: a) a tracrRNA having at least 90%, at least 95%, or 100% sequence identity to SEQ ID NO: 42, wherein the CRISPR repeat has at least 90%, at least 95%, or 100% sequence identity to SEQ ID NO: 21; b) a tracrRNA having at least 90%, at least 95%, or 100% sequence identity to SEQ ID NO: 43, wherein the CRISPR repeat has at least 90%, at least 95%, or 100% sequence identity to SEQ ID NO: 22; c) a tracrRNA having at least 90%, at least 95%, or 100% sequence identity to SEQ ID NO: 44 or nucleotides 19-111 of SEQ ID NO: 1040, wherein the CRISPR repeat has at least 90%, at least 95%, or 100% sequence identity to SEQ ID NO: 23; d) a tracrRNA having at least 90%, at least 95%, or 100% sequence identity to SEQ ID NO: 45, wherein the CRISPR repeat has at least 90%, at least 95%, or 100% sequence identity to SEQ ID NO: 24; e) a tracrRNA having at least 90%, at least 95%, or 100% sequence identity to SEQ ID NO: 46 or nucleotides 22-85 of SEQ ID NO: 1041 or 1042, wherein the CRISPR repeat has at least 90%, at least 95%, or 100% sequence identity to SEQ ID NO: 25 or nucleotides 1-17 of SEQ ID NO: 1041 or 1042; f) a tracrRNA having at least 90%, at least 95%, or 100% sequence identity to SEQ ID NO: 47 or nucleotides 24-138 of SEQ ID NO: 1043, wherein the CRISPR repeat has at least 90%, at least 95%, or 100% sequence identity to SEQ ID NO: 26; g) a tracrRNA having at least 90%, at least 95%, or 100% sequence identity to SEQ ID NO: 48 or nucleotides 27-96 of SEQ ID NO 1044 or nucleotides 27-95 of SEQ ID NO: 1045, wherein the CRISPR repeat has at least 90%, at least 95%, or 100% sequence identity to SEQ ID NO: 27 or nucleotides 1-22 of SEQ ID NO: 1044 or 1045; h) a tracrRNA having at least 90%, at least 95%, or 100% sequence identity to SEQ ID NO: 49, wherein the CRISPR repeat has at least 90%, at least 95%, or 100% sequence identity to SEQ ID NO: 28; i) a tracrRNA having at least 90%, at least 95%, or 100% sequence identity to SEQ ID NO: 50, wherein the CRISPR repeat has at least 90%, at least 95%, or 100% sequence identity to SEQ ID NO: 29; j) a tracrRNA having at least 90%, at least 95%, or 100% sequence identity to SEQ ID NO: 51, wherein the CRISPR repeat has at least 90%, at least 95%, or 100% sequence identity to SEQ ID NO: 30; k) a tracrRNA having at least 90%, at least 95%, or 100% sequence identity to SEQ ID NO: 52, wherein the CRISPR repeat has at least 90%, at least 95%, or 100% sequence identity to SEQ ID NO: 31; 1) a tracrRNA having at least 90%, at least 95%, or 100% sequence identity to SEQ ID NO: 53, wherein the CRISPR repeat has at least 90%, at least 95%, or 100% sequence identity to SEQ ID NO: 32; m) a tracrRNA having at least 90%, at least 95%, or 100% sequence identity to SEQ ID NO: 54, wherein the CRISPR repeat has at least 90%, at least 95%, or 100% sequence identity to SEQ ID NO: 33; n) a tracrRNA having at least 90%, at least 95%, or 100% sequence identity to SEQ ID NO: 55, wherein the CRISPR repeat has at least 90%, at least 95%, or 100% sequence identity to SEQ ID NO: 34; o) a tracrRNA having at least 90%, at least 95%, or 100% sequence identity to SEQ ID NO: 56, wherein the CRISPR repeat has at least 90%, at least 95%, or 100% sequence identity to SEQ ID NO: 35; p) a tracrRNA having at least 90%, at least 95%, or 100% sequence identity to SEQ ID NO: 57, wherein the CRISPR repeat has at least 90%, at least 95%, or 100% sequence identity to SEQ ID NO: 36; q) a tracrRNA having at least 90%, at least 95%, or 100% sequence identity to SEQ ID NO: 58, wherein the CRISPR repeat has at least 90%, at least 95%, or 100% sequence identity to SEQ ID NO: 37; r) a tracrRNA having at least 90%, at least 95%, or 100% sequence identity to SEQ ID NO: 59 or 60, wherein the CRISPR repeat has at least 90%, at least 95%, or 100% sequence identity to SEQ ID NO: 38 or 39; s) a tracrRNA having at least 90%, at least 95%, or 100% sequence identity to SEQ ID NO: 61, wherein the CRISPR repeat has at least 90%, at least 95%, or 100% sequence identity to SEQ ID NO: 40; and t) a tracrRNA having at least 90%, at least 95%, or 100% sequence identity to SEQ ID NO: 62, wherein the CRISPR repeat has at least 90%, at least 95%, or 100% sequence identity to SEQ ID NO: 41.

[0044] In some embodiments of the above aspect, the polynucleotide encoding the crRNA and the polynucleotide encoding the tracrRNA are operably linked to the same promoter and are encoded as a single guide RNA.

[0045] In some embodiments of the above aspect, the polynucleotide encoding the crRNA and the polynucleotide encoding the tracrRNA are operably linked to separate promoters.

[0046] In some embodiments of the above aspect, the vector further comprises a polynucleotide encoding the RGN polypeptide. In some embodiments, the RGN polypeptide is selected from the group consisting of: a) a RGN polypeptide having at least 90%, at least 95%, or 100% sequence identity to SEQ ID NO: 1, wherein the CRISPR repeat has at least 90%, at least 95%, or 100% sequence identity to SEQ ID NO: 21 and the tracrRNA has at least 90%, at least 95%, or 100% sequence identity to SEQ ID NO: 42; b) a RGN polypeptide having at least 90%, at least 95%, or 100% sequence identity to SEQ ID NO: 2, wherein the CRISPR repeat has at least 90%, at least 95%, or 100% sequence identity to SEQ ID NO: 22 and the tracrRNA has at least 90%, at least 95%, or 100% sequence identity to SEQ ID NO: 43; c) a RGN polypeptide having at least 90%, at least 95%, or 100% sequence identity to SEQ ID NO: 3, wherein the CRISPR repeat has at least 90%, at least 95%, or 100% sequence identity to SEQ ID NO: 23 and the tracrRNA has at least 90%, at least 95%, or 100% sequence identity to SEQ ID NO: 44 or nucleotides 19-111 of SEQ ID NO: 1040; d) a RGN polypeptide having at least 90%, at least 95%, or 100% sequence identity to SEQ ID NO: 4, wherein the CRISPR repeat has at least 90%, at least 95%, or 100% sequence identity to SEQ ID NO: 24 and the tracrRNA has at least 90%, at least 95%, or 100% sequence identity to SEQ ID NO: 45; e) a RGN polypeptide having at least 90%, at least 95%, or 100% sequence identity to SEQ ID NO: 5, wherein the CRISPR repeat has at least 90%, at least 95%, or 100% sequence identity to SEQ ID NO: 25 or nucleotides 1-17 of SEQ ID NO: 1041 or 1042 and the tracrRNA has at least 90%, at least 95%, or 100% sequence identity to SEQ ID NO: 46 or nucleotides 22-85 of SEQ ID NO: 1041 or 1042; f) a RGN polypeptide having at least 90%, at least 95%, or 100% sequence identity to SEQ ID NO: 6, wherein the CRISPR repeat has at least 90%, at least 95%, or 100% sequence identity to SEQ ID NO:26 and the tracrRNA has at least 90%, at least 95%, or 100% sequence identity to SEQ ID NO: 47 or nucleotides 24-138 of SEQ ID NO: 1043; g) a RGN polypeptide having at least 90%, at least 95%, or 100% sequence identity to SEQ ID NO: 7, wherein the CRISPR repeat has at least 90%, at least 95%, or 100% sequence identity to SEQ ID NO: 27 or nucleotides 1-22 of SEQ ID NO: 1044 or 1045 and the tracrRNA has at least 90%, at least 95%, or 100% sequence identity to SEQ ID NO: 48 or nucleotides 27-96 of SEQ ID NO 1044 or nucleotides 27-95 of SEQ ID NO: 1045; h) a RGN polypeptide having at least 90%, at least 95%, or 100% sequence identity to SEQ ID NO: 8, wherein the CRISPR repeat has at least 90%, at least 95%, or 100% sequence identity to SEQ ID NO: 28 and the tracrRNA has at least 90%, at least 95%, or 100% sequence identity to SEQ ID NO: 49; i) a RGN polypeptide having at least 90%, at least 95%, or 100% sequence identity to SEQ ID NO: 9, wherein the CRISPR repeat has at least 90%, at least 95%, or 100% sequence identity to SEQ ID NO: 29 and the tracrRNA has at least 90%, at least 95%, or 100% sequence identity to SEQ ID NO: 50; j) a RGN polypeptide having at least 90%, at least 95%, or 100% sequence identity to SEQ ID NO: 10, wherein the CRISPR repeat has at least 90%, at least 95%, or 100% sequence identity to SEQ ID NO: 30 and the tracrRNA has at least 90%, at least 95%, or 100% sequence identity to SEQ ID NO: 51; k) a RGN polypeptide having at least 90%, at least 95%, or 100% sequence identity to SEQ ID NO: 11, wherein the CRISPR repeat has at least 90%, at least 95%, or 100% sequence identity to SEQ ID NO: 31 and the tracrRNA has at least 90%, at least 95%, or 100% sequence identity to SEQ ID NO: 52; l) a RGN polypeptide having at least 90%, at least 95%, or 100% sequence identity to SEQ ID NO: 12, wherein the CRISPR repeat has at least 90%, at least 95%, or 100% sequence identity to SEQ ID NO: 32 and the tracrRNA has at least 90%, at least 95%, or 100% sequence identity to SEQ ID NO: 53; m) a RGN polypeptide having at least 90%, at least 95%, or 100% sequence identity to SEQ ID NO: 13, wherein the CRISPR repeat has at least 90%, at least 95%, or 100% sequence identity to SEQ ID NO: 33 and the tracrRNA has at least 90%, at least 95%, or 100% sequence identity to SEQ ID NO: 54; n) a RGN polypeptide having at least 90%, at least 95%, or 100% sequence identity to SEQ ID NO: 14, wherein the CRISPR repeat has at least 90%, at least 95%, or 100% sequence identity to SEQ ID NO: 34 and the tracrRNA has at least 90%, at least 95%, or 100% sequence identity to SEQ ID NO: 55; o) a RGN polypeptide having at least 90%, at least 95%, or 100% sequence identity to SEQ ID NO: 15, wherein the CRISPR repeat has at least 90%, at least 95%, or 100% sequence identity to SEQ ID NO: 35 and the tracrRNA has at least 90%, at least 95%, or 100% sequence identity to SEQ ID NO: 56; p) a RGN polypeptide having at least 90%, at least 95%, or 100% sequence identity to SEQ ID NO: 16, wherein the CRISPR repeat has at least 90%, at least 95%, or 100% sequence identity to SEQ ID NO: 36 and the tracrRNA has at least 90%, at least 95%, or 100% sequence identity to SEQ ID NO: 57; q) a RGN polypeptide having at least 90%, at least 95%, or 100% sequence identity to SEQ ID NO: 17, wherein the CRISPR repeat has at least 90%, at least 95%, or 100% sequence identity to SEQ ID NO: 37 and the tracrRNA has at least 90%, at least 95%, or 100% sequence identity to SEQ ID NO: 58; r) a RGN polypeptide having at least 90%, at least 95%, or 100% sequence identity to SEQ ID NO: 18, wherein the CRISPR repeat has at least 90%, at least 95%, or 100% sequence identity to SEQ ID NO: 38 or 39 and the tracrRNA has at least 90%, at least 95%, or 100% sequence identity to SEQ ID NO: 59 or 60; s) a RGN polypeptide having at least 90%, at least 95%, or 100% sequence identity to SEQ ID NO: 19, wherein the CRISPR repeat has at least 90%, at least 95%, or 100% sequence identity to SEQ ID NO: 40 and the tracrRNA has at least 90%, at least 95%, or 100% sequence identity to SEQ ID NO: 61; and t) a RGN polypeptide having at least 90%, at least 95%, or 100% sequence identity to SEQ ID NO: 20, wherein the CRISPR repeat has at least 90%, at least 95%, or 100% sequence identity to SEQ ID NO: 41 and the tracrRNA has at least 90%, at least 95%, or 100% sequence identity to SEQ ID NO: 62.

[0047] In another aspect, the present disclosure provides a nucleic acid molecule comprising a trans-activating CRISPR RNA (tracrRNA) or a polynucleotide encoding a tracrRNA comprising a nucleotide sequence having at least 90% sequence identity to any one of SEQ ID NOs: 42-62, nucleotides 19-111 of SEQ ID NO: 1040, nucleotides 22-85 of SEQ ID NO: 1041 or 1042, nucleotides 24-138 of SEQ ID NO: 143, nucleotides 27-96 of SEQ ID NO: 1044, or nucleotides 27-95 of SEQ ID NO: 1045.

[0048] In some embodiments of the above aspect, a guide RNA comprising the tracrRNA and a crRNA comprising a spacer and a CRISPR repeat, wherein the tracrRNA hybridizes with the CRISPR repeat of the crRNA, is capable of hybridizing to the non-target strand of a target sequence in a target nucleic acid molecule in a sequence specific manner through the spacer of the crRNA when the guide RNA is bound to an RNA-guided nuclease (RGN) polypeptide.

[0049] In some embodiments of the above aspect, the polynucleotide encoding a tracrRNA is operably linked to a promoter heterologous to the polynucleotide.

[0050] In some embodiments of the above aspect, the tracrRNA comprises a nucleotide sequence having at least 95% or 100% sequence identity to any one of SEQ ID NOs: 42-62, nucleotides 19-111 of SEQ ID NO: 1040, nucleotides 22-85 of SEQ ID NO: 1041 or 1042, nucleotides 24-138 of SEQ ID NO: 143, nucleotides 27-96 of SEQ ID NO: 1044, or nucleotides 27-95 of SEQ ID NO: 1045.

[0051] In another aspect, the present disclosure provides a vector comprising the nucleic acid molecule comprising the polynucleotide encoding a tracrRNA described hereinabove.

[0052] In some embodiments of the above aspect, the vector further comprises a polynucleotide encoding the crRNA. In some embodiments, the crRNA comprises a CRISPR repeat selected from the group consisting of: a) a CRISPR repeat having at least 90%, at least 95%, or 100% sequence identity to SEQ ID NO: 21, wherein the tracrRNA has at least 90%, at least 95%, or 100% sequence identity to SEQ ID NO: 42; b) a CRISPR repeat having at least 90%, at least 95%, or 100% sequence identity to SEQ ID NO: 22, wherein the tracrRNA has at least 90%, at least 95%, or 100% sequence identity to SEQ ID NO: 43; c) a CRISPR repeat having at least 90%, at least 95%, or 100% sequence identity to SEQ ID NO: 23, wherein the tracrRNA has at least 90%, at least 95%, or 100% sequence identity to SEQ ID NO: 44 or nucleotides 19-111 of SEQ ID NO: 1040; d) a CRISPR repeat having at least 90%, at least 95%, or 100% sequence identity to SEQ ID NO: 24, wherein the tracrRNA has at least 90%, at least 95%, or 100% sequence identity to SEQ ID NO: 45; e) a CRISPR repeat having at least 90%, at least 95%, or 100% sequence identity to SEQ ID NO: 25 or nucleotides 1-17 of SEQ ID NO: 1041 or 1042, wherein the tracrRNA has at least 90%, at least 95%, or 100% sequence identity to SEQ ID NO: 46 or nucleotides 22-85 of SEQ ID NO: 1041 or 1042; f) a CRISPR repeat having at least 90%, at least 95%, or 100% sequence identity to SEQ ID NO: 26, wherein the tracrRNA has at least 90%, at least 95%, or 100% sequence identity to SEQ ID NO: 47 or nucleotides 24-138 of SEQ ID NO: 1043; g) a CRISPR repeat having at least 90%, at least 95%, or 100% sequence identity to SEQ ID NO: 27 or nucleotides 1-22 of SEQ ID NO: 1044 or 1045, wherein the tracrRNA has at least 90%, at least 95%, or 100% sequence identity to SEQ ID NO: 48 or nucleotides 27-96 of SEQ ID NO 1044 or nucleotides 27-95 of SEQ ID NO: 1045; h) a CRISPR repeat having at least 90%, at least 95%, or 100% sequence identity to SEQ ID NO: 28, wherein the tracrRNA has at least 90%, at least 95%, or 100% sequence identity to SEQ ID NO: 49; i) a CRISPR repeat having at least 90%, at least 95%, or 100% sequence identity to SEQ ID NO: 29, wherein the tracrRNA has at least 90%, at least 95%, or 100% sequence identity to SEQ ID NO: 50; j) a CRISPR repeat having at least 90%, at least 95%, or 100% sequence identity to SEQ ID NO: 30, wherein the tracrRNA has at least 90%, at least 95%, or 100% sequence identity to SEQ ID NO: 51; k) a CRISPR repeat having at least 90%, at least 95%, or 100% sequence identity to SEQ ID NO: 31, wherein the tracrRNA has at least 90%, at least 95%, or 100% sequence identity to SEQ ID NO: 52; l) a CRISPR repeat having at least 90%, at least 95%, or 100% sequence identity to SEQ ID NO: 32, wherein the tracrRNA has at least 90%, at least 95%, or 100% sequence identity to SEQ ID NO: 53; m) a CRISPR repeat having at least 90%, at least 95%, or 100% sequence identity to SEQ ID NO: 33, wherein the tracrRNA has at least 90%, at least 95%, or 100% sequence identity to SEQ ID NO: 54; n) a CRISPR repeat having at least 90%, at least 95%, or 100% sequence identity to SEQ ID NO: 34, wherein the tracrRNA has at least 90%, at least 95%, or 100% sequence identity to SEQ ID NO: 55; o) a CRISPR repeat having at least 90%, at least 95%, or 100% sequence identity to SEQ ID NO: 35, wherein the tracrRNA has at least 90%, at least 95%, or 100% sequence identity to SEQ ID NO: 56; p) a CRISPR repeat having at least 90%, at least 95%, or 100% sequence identity to SEQ ID NO: 36, wherein the tracrRNA has at least 90%, at least 95%, or 100% sequence identity to SEQ ID NO: 57; q) a CRISPR repeat having at least 90%, at least 95%, or 100% sequence identity to SEQ ID NO: 37, wherein the tracrRNA has at least 90%, at least 95%, or 100% sequence identity to SEQ ID NO: 58; r) a CRISPR repeat having at least 90%, at least 95%, or 100% sequence identity to SEQ ID NO: 38 or 39, wherein the tracrRNA has at least 90%, at least 95%, or 100% sequence identity to SEQ ID NO: 59 or 60; s) a CRISPR repeat having at least 90%, at least 95%, or 100% sequence identity to SEQ ID NO: 40, wherein the tracrRNA has at least 90%, at least 95%, or 100% sequence identity to SEQ ID NO: 61; and t) a CRISPR repeat having at least 90%, at least 95%, or 100% sequence identity to SEQ ID NO: 41, wherein the tracrRNA has at least 90%, at least 95%, or 100% sequence identity to SEQ ID NO: 62.

[0053] In some embodiments of the above aspect, the polynucleotide encoding the crRNA and the polynucleotide encoding the tracrRNA are operably linked to the same promoter and are encoded as a single guide RNA.

[0054] In some embodiments of the above aspect, the polynucleotide encoding the crRNA and the polynucleotide encoding the tracrRNA are operably linked to separate promoters.

[0055] In some embodiments of the above aspect, the vector further comprises a polynucleotide encoding the RGN polypeptide. In some embodiments, the RGN polypeptide is selected from the group consisting of: a) a RGN polypeptide having at least 90%, at least 95%, or 100% sequence identity to SEQ ID NO: 1, wherein the crRNA comprises a CRISPR repeat having at least 90%, at least 95%, or 100% sequence identity to SEQ ID NO: 21 and the tracrRNA has at least 90%, at least 95%, or 100% sequence identity to SEQ ID NO: 42; b) a RGN polypeptide having at least 90%, at least 95%, or 100% sequence identity to SEQ ID NO: 2, wherein the crRNA comprises a CRISPR repeat having at least 90%, at least 95%, or 100% sequence identity to SEQ ID NO: 22 and the tracrRNA has at least 90%, at least 95%, or 100% sequence identity to SEQ ID NO: 43; c) a RGN polypeptide having at least 90%, at least 95%, or 100% sequence identity to SEQ ID NO: 3, wherein the crRNA comprises a CRISPR repeat having at least 90%, at least 95%, or 100% sequence identity to SEQ ID NO: 23 and the tracrRNA has at least 90%, at least 95%, or 100% sequence identity to SEQ ID NO: 44 or nucleotides 19-111 of SEQ ID NO: 1040; d) a RGN polypeptide having at least 90%, at least 95%, or 100% sequence identity to SEQ ID NO: 4, wherein the crRNA comprises a CRISPR repeat having at least 90%, at least 95%, or 100% sequence identity to SEQ ID NO: 24 and the tracrRNA has at least 90%, at least 95%, or 100% sequence identity to SEQ ID NO: 45; e) a RGN polypeptide having at least 90%, at least 95%, or 100% sequence identity to SEQ ID NO: 5, wherein the crRNA comprises a CRISPR repeat having at least 90%, at least 95%, or 100% sequence identity to SEQ ID NO: 25 or nucleotides 1-17 of SEQ ID NO: 1041 or 1042 and the tracrRNA has at least 90%, at least 95%, or 100% sequence identity to SEQ ID NO: 46 or nucleotides 22-85 of SEQ ID NO: 1041 or 1042; f) a RGN polypeptide having at least 90%, at least 95%, or 100% sequence identity to SEQ ID NO: 6, wherein the crRNA comprises a CRISPR repeat having at least 90%, at least 95%, or 100% sequence identity to SEQ ID NO: 26 and the tracrRNA has at least 90%, at least 95%, or 100% sequence identity to SEQ ID NO: 47 or nucleotides 24-138 of SEQ ID NO: 1043; g) a RGN polypeptide having at least 90%, at least 95%, or 100% sequence identity to SEQ ID NO: 7, wherein the crRNA comprises a CRISPR repeat having at least 90%, at least 95%, or 100% sequence identity to SEQ ID NO: 27 or nucleotides 1-22 of SEQ ID NO: 1044 or 1045 and the tracrRNA has at least 90%, at least 95%, or 100% sequence identity to SEQ ID NO: 48 or nucleotides 27-96 of SEQ ID NO 1044 or nucleotides 27-95 of SEQ ID NO: 1045; h) a RGN polypeptide having at least 90%, at least 95%, or 100% sequence identity to SEQ ID NO: 8, wherein the crRNA comprises a CRISPR repeat having at least 90%, at least 95%, or 100% sequence identity to SEQ ID NO: 28 and the tracrRNA has at least 90%, at least 95%, or 100% sequence identity to SEQ ID NO: 49; i) a RGN polypeptide having at least 90%, at least 95%, or 100% sequence identity to SEQ ID NO: 9, wherein the crRNA comprises a CRISPR repeat having at least 90%, at least 95%, or 100% sequence identity to SEQ ID NO: 29 and the tracrRNA has at least 90%, at least 95%, or 100% sequence identity to SEQ ID NO: 50; j) a RGN polypeptide having at least 90%, at least 95%, or 100% sequence identity to SEQ ID NO: 10, wherein the crRNA comprises a CRISPR repeat having at least 90%, at least 95%, or 100% sequence identity to SEQ ID NO: 30 and the tracrRNA has at least 90%, at least 95%, or 100% sequence identity to SEQ ID NO: 51; k) a RGN polypeptide having at least 90%, at least 95%, or 100% sequence identity to SEQ ID NO: 11, wherein the crRNA comprises a CRISPR repeat having at least 90%, at least 95%, or 100% sequence identity to SEQ ID NO: 31 and the tracrRNA has at least 90%, at least 95%, or 100% sequence identity to SEQ ID NO: 52; l) a RGN polypeptide having at least 90%, at least 95%, or 100% sequence identity to SEQ ID NO: 12, wherein the crRNA comprises a CRISPR repeat having at least 90%, at least 95%, or 100% sequence identity to SEQ ID NO: 32 and the tracrRNA has at least 90%, at least 95%, or 100% sequence identity to SEQ ID NO: 53; m) a RGN polypeptide having at least 90%, at least 95%, or 100% sequence identity to SEQ ID NO: 13, wherein the crRNA comprises a CRISPR repeat having at least 90%, at least 95%, or 100% sequence identity to SEQ ID NO: 33 and the tracrRNA has at least 90%, at least 95%, or 100% sequence identity to SEQ ID NO: 54; n) a RGN polypeptide having at least 90%, at least 95%, or 100% sequence identity to SEQ ID NO: 14, wherein the crRNA comprises a CRISPR repeat having at least 90%, at least 95%, or 100% sequence identity to SEQ ID NO: 34 and the tracrRNA has at least 90%, at least 95%, or 100% sequence identity to SEQ ID NO: 55; o) a RGN polypeptide having at least 90%, at least 95%, or 100% sequence identity to SEQ ID NO: 15, wherein the crRNA comprises a CRISPR repeat having at least 90%, at least 95%, or 100% sequence identity to SEQ ID NO: 35 and the tracrRNA has at least 90%, at least 95%, or 100% sequence identity to SEQ ID NO: 56; p) a RGN polypeptide having at least 90%, at least 95%, or 100% sequence identity to SEQ ID NO: 16, wherein the crRNA comprises a CRISPR repeat having at least 90%, at least 95%, or 100% sequence identity to SEQ ID NO: 36 and the tracrRNA has at least 90%, at least 95%, or 100% sequence identity to SEQ ID NO: 57; q) a RGN polypeptide having at least 90%, at least 95%, or 100% sequence identity to SEQ ID NO: 17, wherein the crRNA comprises a CRISPR repeat having at least 90%, at least 95%, or 100% sequence identity to SEQ ID NO: 37 and the tracrRNA has at least 90%, at least 95%, or 100% sequence identity to SEQ ID NO: 58; r) a RGN polypeptide having at least 90%, at least 95%, or 100% sequence identity to SEQ ID NO: 18, wherein the crRNA comprises a CRISPR repeat having at least 90%, at least 95%, or 100% sequence identity to SEQ ID NO: 38, or 39 and the tracrRNA has at least 90%, at least 95%, or 100% sequence identity to SEQ ID NO: 59 or 60; s) a RGN polypeptide having at least 90%, at least 95%, or 100% sequence identity to SEQ ID NO: 19, wherein the crRNA comprises a CRISPR repeat having at least 90%, at least 95%, or 100% sequence identity to SEQ ID NO: 40 and the tracrRNA has at least 90%, at least 95%, or 100% sequence identity to SEQ ID NO: 61; and t) a RGN polypeptide having at least 90%, at least 95%, or 100% sequence identity to SEQ ID NO: 20, wherein the crRNA comprises a CRISPR repeat having at least 90%, at least 95%, or 100% sequence identity to SEQ ID NO: 41 and the tracrRNA has at least 90%, at least 95%, or 100% sequence identity to SEQ ID NO: 62.

[0056] In another aspect, the present disclosure provides a cell comprising a nucleic acid molecule, a vector, a single guide RNA, or a double guide RNA described hereinabove.

[0057] In some embodiments of the above aspect, the cell is a prokaryotic cell.

[0058] In some embodiments of the above aspect, the cell is a eukaryotic cell. In some embodiments, the eukaryotic cell is a mammalian cell. In some embodiments, the mammalian cell is a human cell. In some embodiments, the human cell is an immune cell. In some embodiments, the immune cell is a stem cell. In some embodiments, stem cell is an induced pluripotent stem cell. In some embodiments, the eukaryotic cell is an insect or avian cell. In some embodiments, the eukaryotic cell is a fungal cell. In some embodiments, the eukaryotic cell is a plant cell.

[0059] In another aspect, the present disclosure provides a plant or a seed comprising a plant cell described hereinabove.

[0060] In another aspect, the present disclosure provides a system for binding a target sequence in a target nucleic acid molecule, wherein the target sequence comprises a target strand and a non-target strand, the system comprising: a) one or more guide RNAs capable of hybridizing to the non-target strand of the target sequence or one or more polynucleotides comprising one or more nucleotide sequences encoding the one or more guide RNAs (gRNAs); and b) an RNA-guided nuclease (RGN) polypeptide comprising an amino acid sequence having at least 90% sequence identity to any one of SEQ ID NOs: 1-20 or a polynucleotide comprising a nucleotide sequence encoding the RGN polypeptide; wherein the one or more guide RNAs are capable of forming a complex with the RGN polypeptide in order to direct the RGN polypeptide to bind to the target sequence.

[0061] In some embodiments of the above aspect, at least one of the nucleotide sequences encoding the one or more guide RNAs and the nucleotide sequence encoding the RGN polypeptide is operably linked to a promoter heterologous to the nucleotide sequence.

[0062] In another aspect, the present disclosure provides a system for binding a target sequence in a target nucleic acid molecule, wherein the target sequence comprises a target strand and a non-target strand, the system comprising: a) one or more guide RNAs capable of hybridizing to the non-target strand of the target sequence or one or more polynucleotides comprising one or more nucleotide sequences encoding the one or more guide RNAs (gRNAs); and b) an RNA-guided nuclease (RGN) polypeptide comprising an amino acid sequence having at least 90% sequence identity to any one of SEQ ID NOs: 1-20; wherein the one or more guide RNAs are capable of forming a complex with the RGN polypeptide in order to direct the RGN polypeptide to bind to the target sequence.

[0063] In some embodiments of the above aspect, at least one of the nucleotides sequences encoding the one or more guide RNAs is operably linked to a promoter heterologous to the nucleotide sequence.

[0064] In some embodiments of the above aspect, the RGN polypeptide comprises an amino acid sequence having at least 95% or 100% sequence identity to any one of SEQ ID NOs: 1-20.

[0065] In some embodiments of the above aspect, the RGN polypeptide and the one or more guide RNAs are not found complexed to one another in nature.

[0066] In some embodiments of the above aspect, the target sequence is a eukaryotic target sequence.

[0067] In some embodiments of the above aspect, the gRNA is a single guide RNA (sgRNA).

[0068] In some embodiments of the above aspect, the gRNA is a dual-guide RNA.

[0069] In some embodiments of the above aspect, the gRNA is selected from the group consisting of: a) a gRNA comprising a CRISPR repeat having at least 90%, at least 95%, or 100% sequence identity to SEQ ID NO: 21 and a tracrRNA having at least 90%, at least 95%, or 100% sequence identity to SEQ ID NO: 42, wherein the RGN polypeptide comprises an amino acid sequence having at least 90%, at least 95%, or 100% sequence identity to SEQ ID NO: 1; b) a gRNA comprising a CRISPR repeat having at least 90%, at least 95%, or 100% sequence identity to SEQ ID NO: 22 and a tracrRNA having at least 90%, at least 95%, or 100% sequence identity to SEQ ID NO: 43, wherein the RGN polypeptide comprises an amino acid sequence having at least 90%, at least 95%, or 100% sequence identity to SEQ ID NO: 2; c) a gRNA comprising a CRISPR repeat having at least 90%, at least 95%, or 100% sequence identity to SEQ ID NO: 23 and a tracrRNA having at least 90%, at least 95%, or 100% sequence identity to SEQ ID NO: 44 or nucleotides 19-111 of SEQ ID NO: 1040, wherein the RGN polypeptide comprises an amino acid sequence having at least 90%, at least 95%, or 100% sequence identity to SEQ ID NO: 3; d) a gRNA comprising a CRISPR repeat having at least 90%, at least 95%, or 100% sequence identity to SEQ ID NO: 24 and a tracrRNA having at least 90%, at least 95%, or 100% sequence identity to SEQ ID NO: 45, wherein the RGN polypeptide comprises an amino acid sequence having at least 90%, at least 95%, or 100% sequence identity to SEQ ID NO: 4; e) a gRNA comprising a CRISPR repeat having at least 90%, at least 95%, or 100% sequence identity to SEQ ID NO: 25 or nucleotides 1-17 of SEQ ID NO: 1041 or 1042 and a tracrRNA having at least 90%, at least 95%, or 100% sequence identity to SEQ ID NO: 46 or nucleotides 22-85 of SEQ ID NO: 1041 or 1042, wherein the RGN polypeptide comprises an amino acid sequence having at least 90%, at least 95%, or 100% sequence identity to SEQ ID NO: 5; f) a gRNA comprising a CRISPR repeat having at least 90%, at least 95%, or 100% sequence identity to SEQ ID NO: 26 and a tracrRNA having at least 90%, at least 95%, or 100% sequence identity to SEQ ID NO: 47 or nucleotides 24-138 of SEQ ID NO: 1043, wherein the RGN polypeptide comprises an amino acid sequence having at least 90%, at least 95%, or 100% sequence identity to SEQ ID NO: 6; g) a gRNA comprising a CRISPR repeat having at least 90%, at least 95%, or 100% sequence identity to SEQ ID NO: 27 or nucleotides 1-22 of SEQ ID NO: 1044 or 1045 and a tracrRNA having at least 90%, at least 95%, or 100% sequence identity to SEQ ID NO: 48 or nucleotides 27-96 of SEQ ID NO 1044 or nucleotides 27-95 of SEQ ID NO: 1045, wherein the RGN polypeptide comprises an amino acid sequence having at least 90%, at least 95%, or 100% sequence identity to SEQ ID NO: 7; h) a gRNA comprising a CRISPR repeat having at least 90%, at least 95%, or 100% sequence identity to SEQ ID NO: 28 and a tracrRNA having at least 90%, at least 95%, or 100% sequence identity to SEQ ID NO: 49, wherein the RGN polypeptide comprises an amino acid sequence having at least 90%, at least 95%, or 100% sequence identity to SEQ ID NO: 8; i) a gRNA comprising a CRISPR repeat having at least 90%, at least 95%, or 100% sequence identity to SEQ ID NO: 29 and a tracrRNA having at least 90%, at least 95%, or 100% sequence identity to SEQ ID NO: 50, wherein the RGN polypeptide comprises an amino acid sequence having at least 90%, at least 95%, or 100% sequence identity to SEQ ID NO: 9; j) a gRNA comprising a CRISPR repeat having at least 90%, at least 95%, or 100% sequence identity to SEQ ID NO: 30 and a tracrRNA having at least 90%, at least 95%, or 100% sequence identity to SEQ ID NO: 51, wherein the RGN polypeptide comprises an amino acid sequence having at least 90%, at least 95%, or 100% sequence identity to SEQ ID NOs:10; k) a gRNA comprising a CRISPR repeat having at least 90%, at least 95%, or 100% sequence identity to SEQ ID NO: 31 and a tracrRNA having at least 90%, at least 95%, or 100% sequence identity to SEQ ID NO: 52, wherein the RGN polypeptide comprises an amino acid sequence having at least 90%, at least 95%, or 100% sequence identity to SEQ ID NO: 11; l) a gRNA comprising a CRISPR repeat having at least 90%, at least 95%, or 100% sequence identity to SEQ ID NO: 32 and a tracrRNA having at least 90%, at least 95%, or 100% sequence identity to SEQ ID NO: 53, wherein the RGN polypeptide comprises an amino acid sequence having at least 90%, at least 95%, or 100% sequence identity to SEQ ID NO: 12; m) a gRNA comprising a CRISPR repeat having at least 90%, at least 95%, or 100% sequence identity to SEQ ID NO: 33 and a tracrRNA having at least 90%, at least 95%, or 100% sequence identity to SEQ ID NO: 54, wherein the RGN polypeptide comprises an amino acid sequence having at least 90%, at least 95%, or 100% sequence identity to SEQ ID NO: 13; n) a gRNA comprising a CRISPR repeat having at least 90%, at least 95%, or 100% sequence identity to SEQ ID NO: 34 and a tracrRNA having at least 90%, at least 95%, or 100% sequence identity to SEQ ID NO: 55, wherein the RGN polypeptide comprises an amino acid sequence having at least 90%, at least 95%, or 100% sequence identity to SEQ ID NO: 14; o) a gRNA comprising a CRISPR repeat having at least 90%, at least 95%, or 100% sequence identity to SEQ ID NO: 35 and a tracrRNA having at least 90%, at least 95%, or 100% sequence identity to SEQ ID NO: 56, wherein the RGN polypeptide comprises an amino acid sequence having at least 90%, at least 95%, or 100% sequence identity to SEQ ID NO: 15; p) a gRNA comprising a CRISPR repeat having at least 90%, at least 95%, or 100% sequence identity to SEQ ID NO: 36 and a tracrRNA having at least 90%, at least 95%, or 100% sequence identity to SEQ ID NO: 57, wherein the RGN polypeptide comprises an amino acid sequence having at least 90%, at least 95%, or 100% sequence identity to SEQ ID NO: 16; q) a gRNA comprising a CRISPR repeat having at least 90%, at least 95%, or 100% sequence identity to SEQ ID NO: 37 and a tracrRNA having at least 90%, at least 95%, or 100% sequence identity to SEQ ID NO: 58, wherein the RGN polypeptide comprises an amino acid sequence having at least 90%, at least 95%, or 100% sequence identity to SEQ ID NO: 17; r) a gRNA comprising a CRISPR repeat having at least 90%, at least 95%, or 100% sequence identity to SEQ ID NO: 38 or 39 and a tracrRNA having at least 90%, at least 95%, or 100% sequence identity to SEQ ID NO: 59 or 60, wherein the RGN polypeptide comprises an amino acid sequence having at least 90%, at least 95%, or 100% sequence identity to SEQ ID NO: 18; s) a gRNA comprising a CRISPR repeat having at least 90%, at least 95%, or 100% sequence identity to SEQ ID NO: 40 and a tracrRNA having at least 90%, at least 95%, or 100% sequence identity to SEQ ID NO: 61, wherein the RGN polypeptide comprises an amino acid sequence having at least 90%, at least 95%, or 100% sequence identity to SEQ ID NO: 19; and t) a gRNA comprising a CRISPR repeat having at least 90%, at least 95%, or 100% sequence identity to SEQ ID NO: 41 and a tracrRNA having at least 90%, at least 95%, or 100% sequence identity to SEQ ID NO: 62, wherein the RGN polypeptide comprises an amino acid sequence having at least 90%, at least 95%, or 100% sequence identity to SEQ ID NO: 20.

[0070] In some embodiments of the above aspect, the target sequence is located adjacent to a protospacer adjacent motif (PAM). In some embodiments, the target sequence is within a cell.

[0071] In some embodiments of the above aspect, wherein the one or more guide RNAs is capable of hybridizing to the non-target strand of the target sequence and the guide RNA is capable of forming a complex with the RGN polypeptide to direct cleavage of the target nucleic acid molecule.

[0072] In some embodiments of the above aspect, the cleavage generates a double-stranded break.

[0073] In some embodiments of the above aspect, the cleavage generates a single-stranded break.

[0074] In some embodiments of the above aspect, the RGN polypeptide is nuclease inactive or is a nickase.

[0075] In some embodiments of the above aspect, the RGN polypeptide is operably linked to a base-editing polypeptide. In some embodiments, the base-editing polypeptide is a deaminase. In some embodiments, the deaminase is a cytosine deaminase or an adenine deaminase. In some embodiments, the deaminase has at least 90%, at least 95%, or 100% sequence identity to an amino acid sequence of any one of SEQ ID NOs: 481-552.

[0076] In some embodiments of the above aspect, the RGN polypeptide comprises one or more nuclear localization signals.

[0077] In some embodiments of the above aspect, the RGN polypeptide is codon optimized for expression in a eukaryotic cell.

[0078] In some embodiments of the above aspect, the nucleotide sequences encoding the one or more guide RNAs and the nucleotide sequence encoding the RGN polypeptide are located on one vector.

[0079] In some embodiments of the above aspect, the system further comprises one or more donor polynucleotides.

[0080] In another aspect, the present disclosure provides a cell comprising a system described hereinabove.

[0081] In some embodiments of the above aspect, the cell is a prokaryotic cell.

[0082] In some embodiments of the above aspect, the cell is a eukaryotic cell. In some embodiments, the eukaryotic cell is a mammalian cell. In some embodiments, the mammalian cell is a human cell. In some embodiments, the human cell is an immune cell. In some embodiments, the immune cell is a stem cell. In some embodiments, the stem cell is an induced pluripotent stem cell. In some embodiments, the eukaryotic cell is an insect or avian cell. In some embodiments, the eukaryotic cell is a fungal cell. In some embodiments, the eukaryotic cell is a plant cell.

[0083] In another aspect, the present invention provides a plant or a seed comprising a plant cell described hereinabove.

[0084] In another aspect, the present invention provides a pharmaceutical composition comprising a nucleic acid molecule, a vector, a cell, a RGN polypeptide, a RNP complex, or a system described hereinabove, and a pharmaceutically acceptable carrier.

[0085] In some embodiments of the above aspect, the pharmaceutically acceptable carrier is heterologous to the nucleic acid molecule, the vector, the cell, the RGN polypeptide, or the system.

[0086] In some embodiments of the above aspect, the pharmaceutically acceptable carrier is not naturally-occurring.

[0087] In some embodiments of the above aspect, the pharmaceutical composition is lipid-based. In some embodiments, the lipid-based pharmaceutical composition comprises liposomes or lipid nanoparticles (LNPs). In some embodiments, nucleic acid molecule, the vector, the cell, the RGN polypeptide, the RGN complex, or the system is encapsulated in, and/or non-covalently or covalently attached to the liposomes or the LNPs.

[0088] In another aspect, the present disclosure provides a method for binding a target sequence in a target nucleic acid molecule comprising delivering a system described hereinabove to the target sequence or a cell comprising the target sequence.

[0089] In some embodiments of the above aspect, the RGN polypeptide or the guide RNA further comprises a detectable label, thereby allowing for detection of the target sequence.

[0090] In some embodiments of the above aspect, the guide RNA or the RGN polypeptide further comprises an expression modulator, thereby modulating expression of a target gene comprising the target sequence.

[0091] In another aspect, the present disclosure provides a method for cleaving and/or modifying a target nucleic acid molecule comprising a target sequence comprising delivering a system described hereinabove to the target sequence or a cell comprising the target sequence, wherein cleavage or modification of the target nucleic acid molecule occurs.

[0092] In some embodiments of the above aspect, the modified target nucleic acid molecule comprises insertion of heterologous DNA into the target DNA sequence.

[0093] In some embodiments of the above aspect, the modified target nucleic acid molecule comprises deletion or mutation of at least one nucleotide from the target nucleic acid molecule.

[0094] In another aspect, the present disclosure provides a method for binding a target sequence in a target nucleic acid molecule, wherein the target sequence comprises a target strand and a non-target strand, wherein the method comprises: a) assembling an RNA-guided nuclease (RGN) ribonucleotide complex by combining: i) one or more guide RNAs capable of hybridizing to the non-target strand of the target sequence; and ii) an RGN polypeptide comprising an amino acid sequence having at least 90% sequence identity to any one of SEQ ID NOs:1-20; under conditions suitable for formation of the RGN ribonucleotide complex; and b) contacting the target nucleic acid molecule or a cell comprising the target nucleic acid molecule with the assembled RGN ribonucleotide complex; wherein the one or more guide RNAs hybridize to the non-target strand of the target sequence, thereby directing the RGN polypeptide to bind to the target sequence.

[0095] In some embodiments of the above aspect, the method is performed in vitro, in vivo, or ex vivo.

[0096] In some embodiments of the above aspect, the RGN polypeptide or the guide RNA further comprises a detectable label, thereby allowing for detection of the target sequence.

[0097] In some embodiments of the above aspect, the guide RNA or the RGN polypeptide further comprises an expression modulator, thereby allowing for the modulation of expression of a target gene comprising the target sequence.

[0098] In some embodiments of the above aspect, the RGN polypeptide further comprises a base-editing polypeptide, thereby allowing for the modification of the target nucleic acid molecule. In some embodiments, the base-editing polypeptide comprises a deaminase. In some embodiments, the deaminase is a cytosine deaminase or an adenine deaminase. In some embodiments, the deaminase has at least 90%, at least 95%, or 100% sequence identity to an amino acid sequence of any one of SEQ ID NOs: 481-552.

[0099] In some embodiments of the above aspect, the RGN polypeptide is capable of cleaving the target nucleic acid molecule, thereby allowing for the cleaving and/or modifying of the target nucleic acid molecule.

[0100] In another aspect, the present disclosure provides a method for cleaving and/or modifying a target nucleic acid molecule comprising a target sequence, wherein the target sequence comprises a target strand and a non-target strand, wherein the method comprises contacting the target nucleic acid molecule with: a) an RNA-guided nuclease (RGN) polypeptide, wherein the RGN comprises an amino acid sequence having at least 90% sequence identity to any one of SEQ ID NOs: 1-20; and b) one or more guide RNAs capable of targeting the RGN of (a) to the target sequence; wherein the one or more guide RNAs hybridize to the non-target strand of the target sequence, thereby directing the RGN polypeptide to bind to the target nucleic acid molecule and cleavage and/or modification of the target nucleic acid molecule occurs.

[0101] In some embodiments of the above aspect, cleavage by the RGN polypeptide generates a double-stranded break.

[0102] In some embodiments of the above aspect, cleavage by the RGN polypeptide generates a single-stranded break.

[0103] In some embodiments of the above aspect, the RGN polypeptide is nuclease inactive or a nickase and is operably fused to a base-editing polypeptide. In some embodiments, the base-editing polypeptide is a deaminase. In some embodiments, the deaminase is a cytosine deaminase or an adenine deaminase. In some embodiments, the deaminase has at least 90%, at least 95%, or 100% sequence identity to an amino acid sequence of any one of SEQ ID NOs: 481-552.

[0104] In some embodiments of the above aspect, the modified target nucleic acid molecule comprises insertion of heterologous DNA into the target nucleic acid molecule.

[0105] In some embodiments of the above aspect, the modified target nucleic acid molecule comprises deletion or mutation of at least one nucleotide from the target nucleic acid molecule.

[0106] In some embodiments of the above aspect, the target sequence is located adjacent to a protospacer adjacent motif (PAM).

[0107] In some embodiments of the above aspect, the target sequence is a eukaryotic target sequence.

[0108] In some embodiments of the above aspect, the gRNA is a single guide RNA (sgRNA).

[0109] In some embodiments of the above aspect, the gRNA is a dual-guide RNA.

[0110] In some embodiments of the above aspect, the RGN comprises an amino acid sequence having at least 95% or 100% sequence identity to any one of SEQ ID NOs: 1-20.

[0111] In some embodiments of the above aspect, a) the RGN has at least 90%, at least 95%, or 100% sequence identity to SEQ ID NO: 1, the guide RNA comprises a crRNA repeat having at least 90%, at least 95%, or 100% sequence identity to SEQ ID NO: 21 and a tracrRNA having at least 90%, at least 95%, or 100% sequence identity to SEQ ID NO: 42; b) the RGN has at least 90%, at least 95%, or 100% sequence identity to SEQ ID NO: 2, the guide RNA comprises a crRNA repeat having at least 90%, at least 95%, or 100% sequence identity to SEQ ID NO: 22 and a tracrRNA having at least 90%, at least 95%, or 100% sequence identity to SEQ ID NO: 43; c) the RGN has at least 90%, at least 95%, or 100% sequence identity to SEQ ID NO: 3, the guide RNA comprises a crRNA repeat having at least 90%, at least 95%, or 100% sequence identity to SEQ ID NO: 23 and a tracrRNA having at least 90%, at least 95%, or 100% sequence identity to SEQ ID NO: 44 or nucleotides 19-111 of SEQ ID NO: 1040; d) the RGN has at least 90%, at least 95%, or 100% sequence identity to SEQ ID NO: 4, the guide RNA comprises a crRNA repeat having at least 90%, at least 95%, or 100% sequence identity to SEQ ID NO: 24 and a tracrRNA having at least 90%, at least 95%, or 100% sequence identity to SEQ ID NO: 45; e) the RGN has at least 90%, at least 95%, or 100% sequence identity to SEQ ID NO: 5, the guide RNA comprises a crRNA repeat having at least 90%, at least 95%, or 100% sequence identity to SEQ ID NO: 25 or nucleotides 1-17 of SEQ ID NO: 1041 or 1042, and a tracrRNA having at least 90%, at least 95%, or 100% sequence identity to SEQ ID NO: 46 or nucleotides 22-85 of SEQ ID NO: 1041 or 1042; f) the RGN has at least 90%, at least 95%, or 100% sequence identity to SEQ ID NO: 6, the guide RNA comprises a crRNA repeat having at least 90%, at least 95%, or 100% sequence identity to SEQ ID NO: 26 and a tracrRNA having at least 90%, at least 95%, or 100% sequence identity to SEQ ID NO: 47 or nucleotides 24-138 of SEQ ID NO: 1043; g) the RGN has at least 90%, at least 95%, or 100% sequence identity to SEQ ID NO: 7, the guide RNA comprises a crRNA repeat having at least 90%, at least 95%, or 100% sequence identity to SEQ ID NO: 27 or nucleotides 1-22 of SEQ ID NO: 1044 or 1045 and a tracrRNA having at least 90%, at least 95%, or 100% sequence identity to SEQ ID NO: 48 or nucleotides 27-96 of SEQ ID NO 1044 or nucleotides 27-95 of SEQ ID NO: 1045; h) the RGN has at least 90%, at least 95%, or 100% sequence identity to SEQ ID NO: 8, the guide RNA comprises a crRNA repeat having at least 90%, at least 95%, or 100% sequence identity to SEQ ID NO: 28 and a tracrRNA having at least 90%, at least 95%, or 100% sequence identity to SEQ ID NO: 49; i) the RGN has at least 90%, at least 95%, or 100% sequence identity to SEQ ID NO: 9, the guide RNA comprises a crRNA repeat having at least 90%, at least 95%, or 100% sequence identity to SEQ ID NO: 29 and a tracrRNA having at least 90%, at least 95%, or 100% sequence identity to SEQ ID NO: 50; j) the RGN has at least 90%, at least 95%, or 100% sequence identity to SEQ ID NO: 10, the guide RNA comprises a crRNA repeat having at least 90%, at least 95%, or 100% sequence identity to SEQ ID NO: 30 and a tracrRNA having at least 90%, at least 95%, or 100% sequence identity to SEQ ID NO: 51; k) the RGN has at least 90%, at least 95%, or 100% sequence identity to SEQ ID NO: 11, the guide RNA comprises a crRNA repeat having at least 90%, at least 95%, or 100% sequence identity to SEQ ID NO: 31 and a tracrRNA having at least 90%, at least 95%, or 100% sequence identity to SEQ ID NO: 52; l) the RGN has at least 90%, at least 95%, or 100% sequence identity to SEQ ID NO: 12, the guide RNA comprises a crRNA repeat having at least 90%, at least 95%, or 100% sequence identity to SEQ ID NO: 32 and a tracrRNA having at least 90%, at least 95%, or 100% sequence identity to SEQ ID NO: 53; m) the RGN has at least 90%, at least 95%, or 100% sequence identity to SEQ ID NO: 13, the guide RNA comprises a crRNA repeat having at least 90%, at least 95%, or 100% sequence identity to SEQ ID NO: 33 and a tracrRNA having at least 90%, at least 95%, or 100% sequence identity to SEQ ID NO: 54; n) the RGN has at least 90%, at least 95%, or 100% sequence identity to SEQ ID NO: 14, the guide RNA comprises a crRNA repeat having at least 90%, at least 95%, or 100% sequence identity to SEQ ID NO: 34 and a tracrRNA having at least 90%, at least 95%, or 100% sequence identity to SEQ ID NO: 55; o) the RGN has at least 90%, at least 95%, or 100% sequence identity to SEQ ID NO: 15, the guide RNA comprises a crRNA repeat having at least 90%, at least 95%, or 100% sequence identity to SEQ ID NO: 35 and a tracrRNA having at least 90%, at least 95%, or 100% sequence identity to SEQ ID NO: 56; p) the RGN has at least 90%, at least 95%, or 100% sequence identity to SEQ ID NO: 16, the guide RNA comprises a crRNA repeat having at least 90%, at least 95%, or 100% sequence identity to SEQ ID NO: 36 and a tracrRNA having at least 90%, at least 95%, or 100% sequence identity to SEQ ID NO: 57; q) the RGN has at least 90%, at least 95%, or 100% sequence identity to SEQ ID NO: 17, the guide RNA comprises a crRNA repeat having at least 90%, at least 95%, or 100% sequence identity to SEQ ID NO: 37 and a tracrRNA having at least 90%, at least 95%, or 100% sequence identity to SEQ ID NO: 58; r) the RGN has at least 90%, at least 95%, or 100% sequence identity to SEQ ID NO: 18, the guide RNA comprises a crRNA repeat having at least 90%, at least 95%, or 100% sequence identity to SEQ ID NO: 38, or 39 and a tracrRNA having at least 90%, at least 95%, or 100% sequence identity to SEQ ID NO: 59 or 60; s) the RGN has at least 90%, at least 95%, or 100% sequence identity to SEQ ID NO: 19, the guide RNA comprises a crRNA repeat having at least 90%, at least 95%, or 100% sequence identity to SEQ ID NO: 40 and a tracrRNA having at least 90%, at least 95%, or 100% sequence identity to SEQ ID NO: 61; and t) the RGN has at least 90%, at least 95%, or 100% sequence identity to SEQ ID NO: 20, the guide RNA comprises a crRNA repeat having at least 90%, at least 95%, or 100% sequence identity to SEQ ID NO: 41 and a tracrRNA having at least 90%, at least 95%, or 100% sequence identity to SEQ ID NO: 62.

[0112] In some embodiments of the above aspect, the target sequence is within a cell. In some embodiments, the cell is a eukaryotic cell. In some embodiments, the eukaryotic cell is a mammalian cell. In some embodiments, the mammalian cell is a human cell. In some embodiments, the human cell is an immune cell. In some embodiments, the immune cell is a stem cell. In some embodiments, the stem cell is an induced pluripotent stem cell. In some embodiments, the eukaryotic cell is an insect or avian cell. In some embodiments, the cell is a prokaryotic cell. In some embodiments, the eukaryotic cell is a fungal cell. In some embodiments, the eukaryotic cell is a plant cell.

[0113] In some embodiments of the above aspect, the method further comprises culturing the cell under conditions in which the RGN polypeptide is expressed and cleaves and modifies the target nucleic acid molecule to produce a modified target nucleic acid molecule; and selecting a cell comprising the modified target nucleic acid molecule.

[0114] In another aspect, the present disclosure provides a cell comprising a modified target nucleic acid molecule described hereinabove.

[0115] In some embodiments of the above aspect, the cell is a eukaryotic cell. In some embodiments, the eukaryotic cell is a mammalian cell. In some embodiments, the mammalian cell is a human cell. In some embodiments, the human cell is an immune cell. In some embodiments, the immune cell is a stem cell. In some embodiments, the stem cell is an induced pluripotent stem cell. In some embodiments, the eukaryotic cell is an insect or avian cell. In some embodiments, the cell is a prokaryotic cell. In some embodiments, the eukaryotic cell is a fungal cell. In some embodiments, the eukaryotic cell is a plant cell.

[0116] In another aspect, the present disclosure provides a plant or a seed comprising a plant cell described hereinabove.

[0117] In another aspect, the present disclosure provides a pharmaceutical composition comprising a cell described hereinabove and a pharmaceutically acceptable carrier.

[0118] In another aspect, the present disclosure provides a method for producing a genetically modified cell with a correction in a causal mutation for a genetically inherited disease, the method comprising introducing into the cell: a) an RNA-guided nuclease (RGN) polypeptide, wherein the RGN polypeptide comprises an amino acid sequence having at least 90% sequence identity to any one of SEQ ID NOs: 1-20, or a polynucleotide encoding the RGN polypeptide, wherein the polynucleotide encoding the RGN polypeptide is operably linked to a promoter to enable expression of the RGN polypeptide in the cell; and b) a guide RNA (gRNA) or a polynucleotide encoding the gRNA, wherein the polynucleotide encoding the gRNA is operably linked to a promoter to enable expression of the gRNA in the cell; whereby the RGN and gRNA target to the genomic location of the causal mutation and modify the genomic sequence to remove the causal mutation.

[0119] In some embodiments of the above aspect, the RGN is nuclease inactive or a nickase and is fused to a polypeptide which has base-editing activity. In some embodiments, the base-editing polypeptide is a deaminase. In some embodiments, the polypeptide with base-editing activity is a cytosine deaminase or an adenine deaminase. In some embodiments, the deaminase has at least 90%, at least 9%, or 100% sequence identity to an amino acid sequence of any one of SEQ ID NOs: 481-552.

[0120] In some embodiments of the above aspect, the genetically inherited disease is caused by a single nucleotide polymorphism.

[0121] In some embodiments of the above aspect, the genetically inherited disease is Hurler Syndrome.

[0122] In some embodiments of the above aspect, the gRNA further comprises a spacer that targets a region proximal to the causal single nucleotide polymorphism.

[0123] In another aspect, the present disclosure provides a method for producing a genetically modified cell with a deletion in a disease-causing expanded trinucleotide repeat, the method comprising introducing into the cell: a) an RNA-guided nuclease (RGN) polypeptide, wherein the RGN polypeptide comprises an amino acid sequence having at least 90% sequence identity to any one of SEQ ID NOs: 1-20, or a polynucleotide encoding the RGN polypeptide, wherein the polynucleotide encoding the RGN polypeptide is operably linked to a promoter to enable expression of the RGN polypeptide in the cell; and b) a first guide RNA (gRNA) or a polynucleotide encoding the gRNA, wherein the polynucleotide encoding the gRNA is operably linked to a promoter to enable expression of the gRNA in the cell, and further wherein the gRNA comprises a spacer that targets the 5′ flank of the expanded trinucleotide repeat; and c) a second guide RNA (gRNA) or a polynucleotide encoding the gRNA, wherein the polynucleotide encoding the gRNA is operably linked to a promoter to enable expression of the gRNA in the cell, and further wherein the second gRNA comprises a spacer that targets the 3′ flank of the expanded trinucleotide repeat; whereby the RGN and the two gRNAs target to the expanded trinucleotide repeat and at least a portion of the expanded trinucleotide repeat is removed.

[0124] In some embodiments of the above aspect, the genetically inherited disease is Friedrich's Ataxia or Huntington's Disease.

[0125] In some embodiments of the above aspect, the first gRNA further comprises a spacer that targets a region within or proximal to the expanded trinucleotide repeat. In some embodiments, the second gRNA further comprises a spacer that targets a region within or proximal to the expanded trinucleotide repeat.

[0126] In some embodiments of the above aspect, the RGN polypeptide has at least 95% or 100% sequence identity to any one of SEQ ID NOs: 1-20.

[0127] In some embodiments of the above aspect, the gRNA, the first gRNA, the second gRNA, or the first gRNA and the second gRNA is selected from a gRNA selected from the group consisting of: a) a gRNA comprising a CRISPR repeat having at least 90%, at least 95%, or 100% sequence identity to SEQ ID NO: 21 and a tracrRNA having at least 90%, at least 95%, or 100% sequence identity to SEQ ID NO: 42, wherein the RGN polypeptide has an amino acid sequence having at least 90%, at least 95%, or 100% sequence identity to SEQ ID NO: 1; b) a gRNA comprising a CRISPR repeat having at least 90%, at least 95%, or 100% sequence identity to SEQ ID NO: 22 and a tracrRNA having at least 90%, at least 95%, or 100% sequence identity to SEQ ID NO: 43, wherein the RGN polypeptide has an amino acid sequence having at least 90%, at least 95%, or 100% sequence identity to SEQ ID NO: 2; c) a gRNA comprising a CRISPR repeat having at least 90%, at least 95%, or 100% sequence identity to SEQ ID NO: 23 and a tracrRNA having at least 90%, at least 95%, or 100% sequence identity to SEQ ID NO: 44 or nucleotides 19-111 of SEQ ID NO: 1040, wherein the RGN polypeptide has an amino acid sequence having at least 90%, at least 95%, or 100% sequence identity to SEQ ID NO: 3; d) a gRNA comprising a CRISPR repeat having at least 90%, at least 95%, or 100% sequence identity to SEQ ID NO: 24 and a tracrRNA having at least 90%, at least 95%, or 100% sequence identity to SEQ ID NO: 45, wherein the RGN polypeptide has an amino acid sequence having at least 90%, at least 95%, or 100% sequence identity to SEQ ID NO: 4; e) a gRNA comprising a CRISPR repeat having at least 90%, at least 95%, or 100% sequence identity to SEQ ID NO: 25 or nucleotides 1-17 of SEQ ID NO: 1041 or 1042, and a tracrRNA having at least 90%, at least 95%, or 100% sequence identity to SEQ ID NO: 46 or nucleotides 22-85 of SEQ ID NO: 1041 or 1042, wherein the RGN polypeptide has an amino acid sequence having at least 90%, at least 95%, or 100% sequence identity to SEQ ID NO: 5; f) a gRNA comprising a CRISPR repeat having at least 90%, at least 95%, or 100% sequence identity to SEQ ID NO: 26 and a tracrRNA having at least 90%, at least 95%, or 100% sequence identity to SEQ ID NO: 47 or nucleotides 24-138 of SEQ ID NO: 1043, wherein the RGN polypeptide has an amino acid sequence having at least 90%, at least 95%, or 100% sequence identity to SEQ ID NO: 6; g) a gRNA comprising a CRISPR repeat having at least 90%, at least 95%, or 100% sequence identity to SEQ ID NO: 27 or nucleotides 1-22 of SEQ ID NO: 1044 or 1045 and a tracrRNA having at least 90%, at least 95%, or 100% sequence identity to SEQ ID NO: 48 or nucleotides 27-96 of SEQ ID NO 1044 or nucleotides 27-95 of SEQ ID NO: 1045, wherein the RGN polypeptide has an amino acid sequence having at least 90%, at least 95%, or 100% sequence identity to SEQ ID NO: 7; h) a gRNA comprising a CRISPR repeat having at least 90%, at least 95%, or 100% sequence identity to SEQ ID NO: 28 and a tracrRNA having at least 90%, at least 95%, or 100% sequence identity to SEQ ID NO: 49, wherein the RGN polypeptide has an amino acid sequence having at least 90%, at least 95%, or 100% sequence identity to SEQ ID NO: 8; i) a gRNA comprising a CRISPR repeat having at least 90%, at least 95%, or 100% sequence identity to SEQ ID NO: 29 and a tracrRNA having at least 90%, at least 95%, or 100% sequence identity to SEQ ID NO: 50, wherein the RGN polypeptide has an amino acid sequence having at least 90%, at least 95%, or 100% sequence identity to SEQ ID NO: 9; j) a gRNA comprising a CRISPR repeat having at least 90%, at least 95%, or 100% sequence identity to SEQ ID NO: 30 and a tracrRNA having at least 90%, at least 95%, or 100% sequence identity to SEQ ID NO: 51, wherein the RGN polypeptide has an amino acid sequence having at least 90%, at least 95%, or 100% sequence identity to SEQ ID NO: 10; k) a gRNA comprising a CRISPR repeat having at least 90%, at least 95%, or 100% sequence identity to SEQ ID NO: 31 and a tracrRNA having at least 90%, at least 95%, or 100% sequence identity to SEQ ID NO: 52, wherein the RGN polypeptide has an amino acid sequence having at least 90%, at least 95%, or 100% sequence identity to SEQ ID NO: 11; l) a gRNA comprising a CRISPR repeat having at least 90%, at least 95%, or 100% sequence identity to SEQ ID NO: 32 and a tracrRNA having at least 90%, at least 95%, or 100% sequence identity to SEQ ID NO: 53, wherein the RGN polypeptide has an amino acid sequence having at least 90%, at least 95%, or 100% sequence identity to SEQ ID NO: 12; m) a gRNA comprising a CRISPR repeat having at least 90%, at least 95%, or 100% sequence identity to SEQ ID NO: 33 and a tracrRNA having at least 90%, at least 95%, or 100% sequence identity to SEQ ID NO: 54, wherein the RGN polypeptide has an amino acid sequence having at least 90%, at least 95%, or 100% sequence identity to SEQ ID NO: 13; n) a gRNA comprising a CRISPR repeat having at least 90%, at least 95%, or 100% sequence identity to SEQ ID NO: 34 and a tracrRNA having at least 90%, at least 95%, or 100% sequence identity to SEQ ID NO: 55, wherein the RGN polypeptide has an amino acid sequence having at least 90%, at least 95%, or 100% sequence identity to SEQ ID NO: 14; o) a gRNA comprising a CRISPR repeat having at least 90%, at least 95%, or 100% sequence identity to SEQ ID NO: 35 and a tracrRNA having at least 90%, at least 95%, or 100% sequence identity to SEQ ID NO: 56, wherein the RGN polypeptide has an amino acid sequence having at least 90%, at least 95%, or 100% sequence identity to SEQ ID NO: 15; p) a gRNA comprising a CRISPR repeat having at least 90%, at least 95%, or 100% sequence identity to SEQ ID NO: 36 and a tracrRNA having at least 90%, at least 95%, or 100% sequence identity to SEQ ID NO: 57, wherein the RGN polypeptide has an amino acid sequence having at least 90%, at least 95%, or 100% sequence identity to SEQ ID NO: 16; q) a gRNA comprising a CRISPR repeat having at least 90%, at least 95%, or 100% sequence identity to SEQ ID NO: 37 and a tracrRNA having at least 90%, at least 95%, or 100% sequence identity to SEQ ID NO: 58, wherein the RGN polypeptide has an amino acid sequence having at least 90%, at least 95%, or 100% sequence identity to SEQ ID NO: 17; r) a gRNA comprising a CRISPR repeat having at least 90%, at least 95%, or 100% sequence identity to SEQ ID NO: 38 or 39 and a tracrRNA having at least 90%, at least 95%, or 100% sequence identity to SEQ ID NO: 58 or 60, wherein the RGN polypeptide has an amino acid sequence having at least 90%, at least 95%, or 100% sequence identity to SEQ ID NO: 18; s) a gRNA comprising a CRISPR repeat having at least 90%, at least 95%, or 100% sequence identity to SEQ ID NO: 40 and a tracrRNA having at least 90%, at least 95%, or 100% sequence identity to SEQ ID NO: 61, wherein the RGN polypeptide has an amino acid sequence having at least 90%, at least 95%, or 100% sequence identity to SEQ ID NO: 19; and t) a gRNA comprising a CRISPR repeat having at least 90%, at least 95%, or 100% sequence identity to SEQ ID NO: 41 and a tracrRNA having at least 90%, at least 95%, or 100% sequence identity to SEQ ID NO: 62, wherein the RGN polypeptide has an amino acid sequence having at least 90%, at least 95%, or 100% sequence identity to SEQ ID NO: 20.

[0128] In some embodiments of the above aspect, the cell is an animal cell. In some embodiments, the animal cell is a mammalian cell. In some embodiments, the cell is derived from a dog, cat, mouse, rat, rabbit, horse, cow, pig, or human.

[0129] In another aspect, the present disclosure provides a method for producing a genetically modified mammalian hematopoietic progenitor cell having decreased BCL11A mRNA and protein expression, the method comprising introducing into an isolated human hematopoietic progenitor cell: a) an RNA-guided nuclease (RGN) polypeptide, wherein the RGN polypeptide comprises an amino acid sequence having at least 90% sequence identity to any one of SEQ ID NOs: 1-20, or a polynucleotide encoding the RGN polypeptide, wherein the polynucleotide encoding the RGN polypeptide is operably linked to a promoter to enable expression of the RGN polypeptide in the cell; and b) a guide RNA (gRNA) or a polynucleotide encoding the gRNA, wherein the polynucleotide encoding the gRNA is operably linked to a promoter to enable expression of the gRNA in the cell, whereby the RGN and gRNA are expressed in the cell and cleave at the BCL11 A enhancer region, resulting in genetic modification of the human hematopoietic progenitor cell and reducing the mRNA and/or protein expression of BCL11 A.

[0130] In some embodiments of the above aspect, the RGN polypeptide has at least 95% or 100% sequence identity to any one of SEQ ID NOs: 1-20.

[0131] In some embodiments of the above aspect, the gRNA is selected from the group consisting of: a) a gRNA comprising a CRISPR repeat having at least 90%, at least 95%, or 100% sequence identity to SEQ ID NO: 21 and a tracrRNA having at least 90%, at least 95%, or 100% sequence identity to SEQ ID NO: 42, wherein the RGN polypeptide has an amino acid sequence having at least 90%, at least 95%, or 100% sequence identity to SEQ ID NO: 1; b) a gRNA comprising a CRISPR repeat having at least 90%, at least 95%, or 100% sequence identity to SEQ ID NO: 22 and a tracrRNA having at least 90%, at least 95%, or 100% sequence identity to SEQ ID NO: 43, wherein the RGN polypeptide has an amino acid sequence having at least 90%, at least 95%, or 100% sequence identity to SEQ ID NO: 2; c) a gRNA comprising a CRISPR repeat having at least 90%, at least 95%, or 100% sequence identity to SEQ ID NO: 23 and a tracrRNA having at least 90%, at least 95%, or 100% sequence identity to SEQ ID NO: 44 or nucleotides 19-111 of SEQ ID NO: 1040, wherein the RGN polypeptide has an amino acid sequence having at least 90%, at least 95%, or 100% sequence identity to SEQ ID NO: 3; d) a gRNA comprising a CRISPR repeat having at least 90%, at least 95%, or 100% sequence identity to SEQ ID NO: 24 and a tracrRNA having at least 90%, at least 95%, or 100% sequence identity to SEQ ID NO: 45, wherein the RGN polypeptide has an amino acid sequence having at least 90%, at least 95%, or 100% sequence identity to SEQ ID NO: 4; e) a gRNA comprising a CRISPR repeat having at least 90%, at least 95%, or 100% sequence identity to SEQ ID NO: 25 or nucleotides 1-17 of SEQ ID NO: 1041 or 1042, and a tracrRNA having at least 90%, at least 95%, or 100% sequence identity to SEQ ID NO: 46 or nucleotides 22-85 of SEQ ID NO: 1041 or 1042, wherein the RGN polypeptide has an amino acid sequence having at least 90%, at least 95%, or 100% sequence identity to SEQ ID NO: 5; f) a gRNA comprising a CRISPR repeat having at least 90%, at least 95%, or 100% sequence identity to SEQ ID NO: 26 and a tracrRNA having at least 90%, at least 95%, or 100% sequence identity to SEQ ID NO: 47 or nucleotides 24-138 of SEQ ID NO: 1043, wherein the RGN polypeptide has an amino acid sequence having at least 90%, at least 95%, or 100% sequence identity to SEQ ID NO: 6; g) a gRNA comprising a CRISPR repeat having at least 90%, at least 95%, or 100% sequence identity to SEQ ID NO: 27 or nucleotides 1-22 of SEQ ID NO: 1044 or 1045 and a tracrRNA having at least 90%, at least 95%, or 100% sequence identity to SEQ ID NO: 48 or nucleotides 27-96 of SEQ ID NO 1044 or nucleotides 27-95 of SEQ ID NO: 1045, wherein the RGN polypeptide has an amino acid sequence having at least 90%, at least 95%, or 100% sequence identity to SEQ ID NO: 7; h) a gRNA comprising a CRISPR repeat having at least 90%, at least 95%, or 100% sequence identity to SEQ ID NO: 28 and a tracrRNA having at least 90%, at least 95%, or 100% sequence identity to SEQ ID NO: 49, wherein the RGN polypeptide has an amino acid sequence having at least 90%, at least 95%, or 100% sequence identity to SEQ ID NO: 8; i) a gRNA comprising a CRISPR repeat having at least 90%, at least 95%, or 100% sequence identity to SEQ ID NO: 29 and a tracrRNA having at least 90%, at least 95%, or 100% sequence identity to SEQ ID NO: 50, wherein the RGN polypeptide has an amino acid sequence having at least 90%, at least 95%, or 100% sequence identity to SEQ ID NO: 9; j) a gRNA comprising a CRISPR repeat having at least 90%, at least 95%, or 100% sequence identity to SEQ ID NO: 30 and a tracrRNA having at least 90%, at least 95%, or 100% sequence identity to SEQ ID NO: 51, wherein the RGN polypeptide has an amino acid sequence having at least 90%, at least 95%, or 100% sequence identity to SEQ ID NO:10; k) a gRNA comprising a CRISPR repeat having at least 90%, at least 95%, or 100% sequence identity to SEQ ID NO: 31 and a tracrRNA having at least 90%, at least 95%, or 100% sequence identity to SEQ ID NO: 52, wherein the RGN polypeptide has an amino acid sequence having at least 90%, at least 95%, or 100% sequence identity to SEQ ID NO: 11; l) a gRNA comprising a CRISPR repeat having at least 90%, at least 95%, or 100% sequence identity to SEQ ID NO: 32 and a tracrRNA having at least 90%, at least 95%, or 100% sequence identity to SEQ ID NO: 53, wherein the RGN polypeptide has an amino acid sequence having at least 90%, at least 95%, or 100% sequence identity to SEQ ID NO: 12; m) a gRNA comprising a CRISPR repeat having at least 90%, at least 95%, or 100% sequence identity to SEQ ID NO: 33 and a tracrRNA having at least 90%, at least 95%, or 100% sequence identity to SEQ ID NO: 54, wherein the RGN polypeptide has an amino acid sequence having at least 90%, at least 95%, or 100% sequence identity to SEQ ID NO: 13; n) a gRNA comprising a CRISPR repeat having at least 90%, at least 95%, or 100% sequence identity to SEQ ID NO: 34 and a tracrRNA having at least 90%, at least 95%, or 100% sequence identity to SEQ ID NO: 55, wherein the RGN polypeptide has an amino acid sequence having at least 90%, at least 95%, or 100% sequence identity to SEQ ID NO: 14; o) a gRNA comprising a CRISPR repeat having at least 90%, at least 95%, or 100% sequence identity to SEQ ID NO: 35 and a tracrRNA having at least 90%, at least 95%, or 100% sequence identity to SEQ ID NO: 56, wherein the RGN polypeptide has an amino acid sequence having at least 90%, at least 95%, or 100% sequence identity to SEQ ID NO: 15; p) a gRNA comprising a CRISPR repeat having at least 90%, at least 95%, or 100% sequence identity to SEQ ID NO: 36 and a tracrRNA having at least 90%, at least 95%, or 100% sequence identity to SEQ ID NO: 57, wherein the RGN polypeptide has an amino acid sequence having at least 90%, at least 95%, or 100% sequence identity to SEQ ID NO: 16; q) a gRNA comprising a CRISPR repeat having at least 90%, at least 95%, or 100% sequence identity to SEQ ID NO: 37 and a tracrRNA having at least 90%, at least 95%, or 100% sequence identity to SEQ ID NO: 58, wherein the RGN polypeptide has an amino acid sequence having at least 90%, at least 95%, or 100% sequence identity to SEQ ID NO: 17; r) a gRNA comprising a CRISPR repeat having at least 90%, at least 95%, or 100% sequence identity to SEQ ID NO: 38 and a tracrRNA having at least 90%, at least 95%, or 100% sequence identity to SEQ ID NO: 59 or 60, wherein the RGN polypeptide has an amino acid sequence having at least 90%, at least 95%, or 100% sequence identity to SEQ ID NO: 18; s) a gRNA comprising a CRISPR repeat having at least 90%, at least 95%, or 100% sequence identity to SEQ ID NO: 39 or 40 and a tracrRNA having at least 90%, at least 95%, or 100% sequence identity to SEQ ID NO: 61, wherein the RGN polypeptide has an amino acid sequence having at least 90%, at least 95%, or 100% sequence identity to SEQ ID NO: 19; and t) a gRNA comprising a CRISPR repeat having at least 90%, at least 95%, or 100% sequence identity to SEQ ID NO: 41 and a tracrRNA having at least 90%, at least 95%, or 100% sequence identity to SEQ ID NO: 62, wherein the RGN polypeptide has an amino acid sequence having at least 90%, at least 95%, or 100% sequence identity to SEQ ID NO: 20.

[0132] In some embodiments of the above aspect, the gRNA further comprises a spacer that targets a region within or proximal to the BCL11 A enhancer region.

[0133] In another aspect, the present disclosure provides a method of treating a disease, disorder, or condition, the method comprising administering to a subject in need thereof a pharmaceutical composition described hereinabove.

[0134] In some embodiments of the above aspect, the disease, disorder, or condition is associated with a causal mutation and the pharmaceutical composition corrects the causal mutation.

[0135] In some embodiments of the above aspect, the subject is at risk of developing the disease, disorder, or condition.

[0136] In another aspect, the present disclosure provides a use of a nucleic acid molecule, a vector, a cell, an RGN polypeptide, an RNP complex, or a system described hereinabove for the treatment of a disease, disorder, or condition in a subject in need thereof.

[0137] In some embodiments of the above aspect, the disease, disorder, or condition is associated with a causal mutation and treating comprises correcting the causal mutation.

[0138] In some embodiments of the above aspect, the subject is at risk of developing the disease, disorder, or condition.

[0139] In another aspect, the present disclosure provides a use of a nucleic acid molecule, a vector, a cell, an RGN polypeptide, an RNP complex, or a system described hereinabove for the manufacture of a medicament useful for treating a disease, disorder, or condition.

[0140] In some embodiments of the above aspect, the disease is associated with a causal mutation and the medicament corrects the causal mutation.

[0141] In another aspect, the present disclosure provides a single guide RNA comprising a nucleic acid molecule comprising a crRNA described hereinabove and a nucleic acid molecule comprising a tracrRNA described hereinabove.

[0142] In another aspect, the present disclosure provides a dual guide RNA comprising a nucleic acid molecule comprising a crRNA described hereinabove and a nucleic acid molecule comprising a tracrRNA described hereinabove.

### DETAILED DESCRIPTION

[0143] Many modifications and other embodiments of the inventions set forth herein will come to mind to one skilled in the art to which these inventions pertain having the benefit of the teachings presented in the foregoing descriptions and the associated drawings. Therefore, it is to be understood that the inventions are not to be limited to the specific embodiments disclosed and that modifications and other embodiments are intended to be included within the scope of the appended embodiments. Although specific terms are employed herein, they are used in a generic and descriptive sense only and not for purposes of limitation.

### I. Overview

[0144] RNA-guided nucleases (RGNs) allow for the targeted manipulation of specific site(s) within a genome and are useful in the context of gene targeting for therapeutic and research applications. In a variety of organisms, including mammals, RNA-guided nucleases have been used for genome engineering by stimulating non-homologous end joining and homologous recombination, for example. The compositions and methods described herein are useful for creating single- or double-stranded breaks in polynucleotides, modifying polynucleotides, detecting a particular site within a polynucleotide, or modifying the expression of a particular gene.

[0145] The RNA-guided nucleases disclosed herein can alter gene expression by modifying a target nucleic acid molecule comprising a target sequence. In specific embodiments, the RNA-guided nucleases are directed to a target sequence (e.g., target DNA sequence) by a guide RNA (gRNA) as part of a Clustered Regularly Interspaced Short Palindromic Repeats (CRISPR) RNA-guided nuclease system. The RGNs are considered “RNA-guided” because guide RNAs form a complex with the RNA-guided nucleases to direct the RNA-guided nuclease to bind to a target sequence and in some embodiments, introduce a single-stranded or double-stranded break at the target sequence (e.g., target DNA sequence). After the target sequence has been cleaved, the break can be repaired such that the sequence of the target nucleic acid molecule is modified during the repair process. Thus, provided herein are methods for using the RNA-guided nucleases to modify a target nucleic acid molecule in a host cell. For example, RNA-guided nucleases can be used to modify a target sequence at a genomic locus of eukaryotic cells or prokaryotic cells.

### II. RNA-Guided Nucleases

[0146] Provided herein are RNA-guided nucleases. The term RNA-guided nuclease (RGN) refers to a polypeptide that binds to a particular target sequence (e.g., target DNA sequence) in a sequence-specific manner and is directed to the target sequence by a guide RNA molecule that is complexed with the polypeptide and hybridizes with the target sequence. Although an RNA-guided nuclease can be capable of cleaving the target sequence upon binding, the term RNA-guided nuclease also encompasses nuclease-dead RNA-guided nucleases that are capable of binding to, but not cleaving, a target sequence. Cleavage of a target sequence by an RNA-guided nuclease can result in a single- or double-stranded break. RNA-guided nucleases only capable of cleaving a single strand of a double-stranded target nucleic acid molecule are referred to herein as nickases.

[0147] The RNA-guided nucleases disclosed herein include the LPG10165, LPG10166, LPG10167, LPG10168, LPG10169, LPG10171, LPG10186, LPG10190, LPG10191, LPG10194, LPG10195, LPG10196, LPG10197, LPG10198, LPG10200, LPG10203, LPG10204, LPG10205, LPG10207 and LPG10208 RNA-guided nucleases, the amino acid sequences of which are set forth, respectively, as SEQ ID NOs: 1-20, and active fragments or variants thereof that retain the ability to bind to a target sequence in an RNA-guided sequence-specific manner. In some of these embodiments, the active fragment or variant of the LPG10165, LPG10166, LPG10167, LPG10168, LPG10169, LPG10171, LPG10186, LPG10190, LPG10191, LPG10194, LPG10195, LPG10196, LPG10197, LPG10198, LPG10200, LPG10203, LPG10204, LPG10205, LPG10207, or LPG10208 RGN is capable of cleaving a single- or double-stranded target sequence. In some embodiments, an active variant of the LPG10165, LPG10166, LPG10167, LPG10168, LPG10169, LPG10171, LPG10186, LPG10190, LPG10191, LPG10194, LPG10195, LPG10196, LPG10197, LPG10198, LPG10200, LPG10203, LPG10204, LPG10205, LPG10207, or LPG10208 RGN comprises an amino acid sequence having at least 40%, 45%, 50%, 55%, 60%, 65%, 70%, 75%, 80%, 81%, 82%, 83%, 84%, 85%, 86%, 87%, 88%, 89%, 90%, 91%, 92%, 93%, 94%, 95%, 96%, 97%, 98%, 99% or more sequence identity to the amino acid sequence set forth as any one of SEQ ID NOs: 1-20.

[0148] In some specific embodiments, an active variant of the LPG10165 RGN comprises an amino acid sequence having at least 85% sequence identity to the amino acid sequence set forth in SEQ ID NO: 1 and retains RNA-guided sequence-specific binding activity. In some embodiments, an active variant of the LPG10166 RGN comprises an amino acid sequence having at least 83% sequence identity to the amino acid sequence set forth in SEQ ID NO: 2 and retains RNA-guided sequence-specific binding activity. In some some embodiments, an active variant of the LPG10167 RGN comprises an amino acid sequence having at least 92% sequence identity to the amino acid sequence set forth in SEQ ID NO: 3 and retains RNA-guided sequence-specific binding activity. In some embodiments, an active variant of the LPG10168 RGN comprises an amino acid sequence having at least 93% sequence identity to the amino acid sequence set forth in SEQ ID NO: 4 and retains RNA-guided sequence-specific binding activity. In some embodiments, an active variant of the LPG10169 RGN comprises an amino acid sequence having at least 95% sequence identity to the amino acid sequence set forth in SEQ ID NO: 5 and retains RNA-guided sequence-specific binding activity. In some embodiments, an active variant of the LPG10171 RGN comprises an amino acid sequence having at least 94% sequence identity to the amino acid sequence set forth in SEQ ID NO: 6 and retains RNA-guided sequence-specific binding activity. In some embodiments, an active variant of the LPG10186 RGN comprises an amino acid sequence having at least 75% sequence identity to the amino acid sequence set forth in SEQ ID NO: 7 and retains RNA-guided sequence-specific binding activity. In some embodiments, an active variant of the LPG10190 RGN comprises an amino acid sequence having at least 84% sequence identity to the amino acid sequence set forth in SEQ ID NO: 8 and retains RNA-guided sequence-specific binding activity. In some embodiments, an active variant of the LPG10191 RGN comprises an amino acid sequence having at least 73% sequence identity to the amino acid sequence set forth in SEQ ID NO: 9 and retains RNA-guided sequence-specific binding activity. In some embodiments, an active variant of the LPG10194 RGN comprises an amino acid sequence having at least 98% sequence identity to the amino acid sequence set forth in SEQ ID NO: 10 and retains RNA-guided sequence-specific binding activity. In some embodiments, an active variant of the LPG10195 RGN comprises an amino acid sequence having at least 88% sequence identity to the amino acid sequence set forth in SEQ ID NO: 11 and retains RNA-guided sequence-specific binding activity. In some embodiments, an active variant of the LPG10196 RGN comprises an amino acid sequence having at least 75% sequence identity to the amino acid sequence set forth in SEQ ID NO: 12 and retains RNA-guided sequence-specific binding activity. In some embodiments, an active variant of the LPG10197 RGN comprises an amino acid sequence having at least 92% sequence identity to the amino acid sequence set forth in SEQ ID NO: 13 and retains RNA-guided sequence-specific binding activity. In some embodiments, an active variant of the LPG10198 RGN comprises an amino acid sequence having at least 97% sequence identity to the amino acid sequence set forth in SEQ ID NO: 14 and retains RNA-guided sequence-specific binding activity. In some embodiments, an active variant of the LPG10200 RGN comprises an amino acid sequence having at least 98% sequence identity to the amino acid sequence set forth in SEQ ID NO: 15 and retains RNA-guided sequence-specific binding activity. In some embodiments, an active variant of the LPG10203 RGN comprises an amino acid sequence having at least 78% sequence identity to the amino acid sequence set forth in SEQ ID NO: 16 and retains RNA-guided sequence-specific binding activity. In some embodiments, an active variant of the LEPG10204 RGN comprises an amino acid sequence having at least 81% sequence identity to the amino acid sequence set forth in SEQ ID NO: 17 and retains RNA-guided sequence-specific binding activity. In some embodiments, an active variant of the LPG10205 RGN comprises an amino acid sequence having at least 81% sequence identity to the amino acid sequence set forth in SEQ ID NO: 18 and retains RNA-guided sequence-specific binding activity. In some embodiments, an active variant of the LPG10207 RGN comprises an amino acid sequence having at least 88% sequence identity to the amino acid sequence set forth in SEQ ID NO: 19 and retains RNA-guided sequence-specific binding activity. In some embodiments, an active variant of the LPG10208 RGN comprises an amino acid sequence having at least 81% sequence identity to the amino acid sequence set forth in SEQ ID NO: 20 and retains RNA-guided sequence-specific binding activity.

[0149] In certain embodiments, an active fragment of the LPG10165, LPG10166, LPG10167, LPG10168, LPG10169, LPG10171, LPG10186, LPG10190, LPG10191, LPG10194, LPG10195, LPG10196, LPG10197, LPG10198, LPG10200, LPG10203, LPG10204, LPG10205, LPG10207, or LPG10208 RGN comprises at least 50, 100, 150, 200, 250, 300, 350, 400, 450, 500, 550, 600, 650, 700, 750, 800, 850, 900, 950, 1000, 1100, 1200, 1300, or more contiguous amino acid residues of the amino acid sequence set forth as any one of SEQ ID NOs: 1-20. RNA-guided nucleases provided herein can comprise at least one nuclease domain (e.g., DNase, RNase domain) and at least one RNA recognition and/or RNA binding domain to interact with guide RNAs. Further domains that can be found in RNA-guided nucleases provided herein include, but are not limited to: DNA binding domains, helicase domains, protein-protein interaction domains, and dimerization domains. In specific embodiments, the RNA-guided nucleases provided herein can comprise at least 70%, 75%, 80%, 85%, 90%, 91%, 92%, 93%, 94%, 95%, 96%, 97%, 98%, 99% or more sequence identity to one or more of a DNA binding domain, helicase domain, protein-protein interaction domain, and dimerization domain.

[0150] A target sequence is bound by an RNA-guided nuclease provided herein. In those instances wherein the target sequence is double-stranded (e.g., double-stranded DNA), the non-target strand of the target sequence hybridizes with the guide RNA associated with the RNA-guided nuclease. The target strand and/or the non-target strand of the target sequence (e.g., target DNA sequence) can then be subsequently cleaved by the RNA-guided nuclease if the polypeptide possesses nuclease activity. The terms “cleave” or “cleavage” refer to the hydrolysis of at least one phosphodiester bond within the backbone of one or both strands of a double-stranded target sequence (e.g., target DNA sequence) that can result in either single-stranded or double-stranded breaks within the target sequence. The presently disclosed RGNs can cleave nucleotides within a polynucleotide, functioning as an endonuclease or can be an exonuclease, removing successive nucleotides from the end (the 5′ and/or the 3′ end) of a polynucleotide. In other embodiments, the disclosed RGNs can cleave nucleotides of a target polynucleotide within any position of a polynucleotide and thus function as both an endonuclease and exonuclease. The cleavage of a target polynucleotide by the presently disclosed RGNs can result in staggered breaks or blunt ends.

[0151] The presently disclosed RNA-guided nucleases can be wild-type sequences derived from bacterial or archaeal species. Alternatively, the RNA-guided nucleases can be variants or fragments of wild-type polypeptides. The wild-type RGN can be modified to alter nuclease activity or alter PAM specificity, for example. In some embodiments, the RNA-guided nuclease is not naturally-occurring.

[0152] In certain embodiments, the RNA-guided nuclease functions as a nickase, only cleaving a single strand of a double-stranded target sequence (e.g., target DNA sequence). Such RNA-guided nucleases have a single functioning nuclease domain. In particular embodiments, the nickase is capable of cleaving the target strand or the non-target strand of the double-stranded target sequence (e.g., target DNA sequence). In some of these embodiments, additional nuclease domains have been mutated such that the nuclease activity is reduced or eliminated. In embodiments wherein a nickase is used, in order to effect a double-stranded cleavage of a double-stranded target sequence (e.g., target DNA sequence), two nickases are needed, each of which nicks a single strand within the double-stranded target sequence.

[0153] In other embodiments, the RNA-guided nuclease lacks nuclease activity altogether and is referred to herein as nuclease-dead or nuclease inactive. Any method known in the art for introducing mutations into an amino acid sequence, such as PCR-mediated mutagenesis and site-directed mutagenesis, can be used for generating nickases or nuclease-dead RGNs. See, e.g., U.S. Publ. No. 2014/0068797 and U.S. Pat. No. 9,790,490; each of which is incorporated by reference in its entirety.

[0154] RNA-guided nucleases that lack nuclease activity can be used to deliver a fused polypeptide, polynucleotide, or small molecule payload to a particular genomic location. In some of these embodiments, the RGN polypeptide or guide RNA can be fused to a detectable label to allow for detection of a particular sequence. As a non-limiting example, a nuclease-dead RGN can be fused to a detectable label (e.g., fluorescent protein) and targeted to a particular sequence associated with a disease to allow for detection of the disease-associated sequence.

[0155] Alternatively, nuclease-dead RGNs can be targeted to particular genomic locations to alter the expression of a desired gene (i.e., target gene). In some embodiments, the binding of a nuclease-dead RNA-guided nuclease to a target sequence results in the reduction in expression of the target gene by interfering with the binding of RNA polymerase or transcription factors within the targeted genomic region. In other embodiments, the RGN (e.g., a nuclease-dead RGN) or its complexed guide RNA further comprises an expression modulator that, upon binding to a target sequence within a target gene, serves to either repress or activate the expression of the target gene. In some of these embodiments, the expression modulator modulates the expression of the target gene through epigenetic mechanisms.

[0156] In other embodiments, the nuclease-dead RGNs or an RGN with nickase activity can be targeted to particular genomic locations to modify the sequence of a target polynucleotide through fusion to a base-editing polypeptide, for example a deaminase polypeptide or active variant or fragment thereof, that directly chemically modifies (e.g., deaminates) a nucleobase, resulting in conversion from one nucleobase to another. The base-editing polypeptide can be fused to the RGN at its N-terminal or C-terminal end. Additionally, the base-editing polypeptide may be fused to the RGN via a peptide linker. A non-limiting example of a deaminase polypeptide that is useful for such compositions and methods includes a cytosine deaminase or an adenine deaminase (such as the adenine deaminase base editor described in Gaudelli et al. (2017) Nature 551:464-471, U.S. Publ. Nos. 2017/0121693 and 2018/0073012, and International Publ. No. WO 2018/027078, or any of the deaminases disclosed in International Publ. Nos. WO 2020/139783 and WO 2022/056254, and International Appl. No. PCT/US2022/021271 filed Mar. 22, 2022, each of which is herein incorporated by reference in its entirety). In one embodiment, the deaminase polypeptide that is useful for such compositions and methods is a cytosine deaminase or an adenine deaminase comprising an amino acid sequence selected from any one of SEQ ID NOs: 481-552. In one embodiment, the deaminase polypeptide that is useful for such compositions and methods is a cytosine deaminase or an adenine deaminase having a sequence that is at least 40%, 45%, 50%, 55%, 60%, 65%, 70%, 75%, 80%, 81%, 82%, 83%, 84%, 85%, 86%, 87%, 88%, 89%, 90%, 91%, 92%, 93%, 94%, 95%, 96%, 97%, 98%, 99%, or greater identity to any one of the amino acid sequences set forth as SEQ ID NOs: 481-552. In some embodiments, the deaminase polypeptide that is useful for such the presently disclosed compositions and methods is a deaminase disclosed in Table 17 of International Publ. No. WO 2020/139783, which is incorporated herein by reference in its entirety. Further, it is known in the art that certain fusion proteins between an RGN and a base-editing enzyme (e.g., cytosine deaminase) may also comprise at least one uracil stabilizing polypeptide that increases the mutation rate of a cytidine, deoxycytidine, or cytosine to a thymidine, deoxythymidine, or thymine in a nucleic acid molecule by a deaminase. Non-limiting examples of uracil stabilizing polypeptides include those disclosed in International Publ. No. WO 2021/217002, which is herein incorporated by reference in its entirety, including USP2 (SEQ ID NO: 564), and a uracil glycosylase inhibitor (UGI) domain (SEQ ID NO: 565), which may increase base editing efficiency. Therefore, a fusion protein may comprise an RGN described herein or variant thereof, a deaminase, and optionally at least one uracil stabilizing polypeptide, such as UGI or USP2. In certain embodiments, the RGN that is fused to the base-editing polypeptide is a nickase that cleaves the DNA strand that is not acted upon by the base-editing polypeptide (e.g., deaminase).

[0157] RNA-guided nucleases that are fused to a polypeptide or domain can be separated or joined by a linker. The term “linker,” as used herein, refers to a chemical group or a molecule linking two molecules or moieties, e.g., a binding domain and a cleavage domain of a nuclease. In some embodiments, a linker joins a gRNA binding domain of an RNA guided nuclease and a base-editing polypeptide, such as a deaminase. In some embodiments, a linker joins a nuclease-dead RGN and a deaminase. Typically, the linker is positioned between, or flanked by, two groups, molecules, or other moieties and connected to each one via a covalent bond, thus connecting the two. In some embodiments, the linker is an amino acid or a plurality of amino acids (e.g., a peptide or protein). In some embodiments, the linker is an organic molecule, group, polymer, or chemical moiety. In some embodiments, the linker is 5-100 amino acids in length, for example, 5, 6, 7, 8, 9, 10, 11, 12, 13, 14, 15, 16, 17, 18, 19, 20, 21, 22, 23, 24, 25, 26, 27, 28, 29, 30, 30-35, 35-40, 40-45, 45-50, 50-60, 60-70, 70-80, 80-90, 90-100, 100-150, or 150-200 amino acids in length. Longer or shorter linkers are also contemplated.

[0158] The presently disclosed RNA-guided nucleases can comprise at least one nuclear localization signal (NLS) to enhance transport of the RGN to the nucleus of a cell. Nuclear localization signals are known in the art and generally comprise a stretch of basic amino acids (see, e.g., Lange et al., J. Biol. Chem. (2007) 282:5101-5105). In some embodiments, the RGN comprises 2, 3, 4, 5, 6 or more nuclear localization signals. The nuclear localization signal(s) can be a heterologous NLS. Non-limiting examples of nuclear localization signals useful for the presently disclosed RGNs are the nuclear localization signals of SV40 Large T-antigen, nucleoplasmin, and c-Myc (see, e.g., Ray et al. (2015) Bioconjug Chem 26(6):1004-7). In particular embodiments, the RGN comprises the NLS sequence set forth as SEQ ID NO: 168 or 170. The RGN can comprise one or more NLS sequences at its N-terminus, C-terminus, or both the N-terminus and C-terminus. For example, the RGN can comprise two NLS sequences at the N-terminal region and four NLS sequences at the C-terminal region.

[0159] Other localization signal sequences known in the art that localize polypeptides to particular subcellular location(s) can also be used to target the RGNs, including, but not limited to, plastid localization sequences, mitochondrial localization sequences, and dual-targeting signal sequences that target to both the plastid and mitochondria (see, e.g., Nassoury and Morse (2005) Biochim Biophys Acta 1743:5-19; Kunze and Berger (2015) Front Physiol dx.doi.org/10.3389/fphys.2015.00259; Herrmann and Neupert (2003) IUBMB Life 55:219-225; Soll (2002) Curr Opin Plant Biol 5:529-535; Carrie and Small (2013) Biochim Biophys Acta 1833:253-259; Carrie et al. (2009) FEBS J 276:1187-1195; Silva-Filho (2003) Curr Opin Plant Biol 6:589-595; Peeters and Small (2001) Biochim Biophys Acta 1541:54-63; Murcha et al. (2014) J Exp Bot 65:6301-6335; Mackenzie (2005) Trends Cell Biol 15:548-554; Glaser et al. (1998) Plant Mol Biol 38:311-338).

[0160] In certain embodiments, the presently disclosed RNA-guided nucleases comprise at least one cell-penetrating domain that facilitates cellular uptake of the RGN. Cell-penetrating domains are known in the art and generally comprise stretches of positively charged amino acid residues (i.e., polycationic cell-penetrating domains), alternating polar amino acid residues and non-polar amino acid residues (i.e., amphipathic cell-penetrating domains), or hydrophobic amino acid residues (i.e., hydrophobic cell-penetrating domains) (see, e.g., Milletti F. (2012) Drug Discov Today 17:850-860). A non-limiting example of a cell-penetrating domain is the trans-activating transcriptional activator (TAT) from the human immunodeficiency virus 1.

[0161] The nuclear localization signal, plastid localization signal, mitochondrial localization signal, dual-targeting localization signal, and/or cell-penetrating domain can be located at the amino-terminus (N-terminus), the carboxyl-terminus (C-terminus), or in an internal location of the RNA-guided nuclease.

[0162] The presently disclosed RGNs can be fused to an effector domain, such as a cleavage domain, a deaminase domain, or an expression modulator domain, either directly or indirectly via a linker peptide. Such a domain can be located at the N-terminus, the C-terminus, or an internal location of the RNA-guided nuclease. In some of these embodiments, the RGN component of the fusion protein is a nuclease-dead RGN or a nickase.

[0163] In some embodiments, the RGN fusion protein comprises a cleavage domain, which is any domain that is capable of cleaving a polynucleotide (i.e., RNA, DNA, or RNA/DNA hybrid) and includes, but is not limited to, restriction endonucleases and homing endonucleases, such as Type IIS endonucleases (e.g., FokI) (see, e.g., Belfort et al. (1997) Nucleic Acids Res. 25:3379-3388; Linn et al. (eds.) Nucleases, Cold Spring Harbor Laboratory Press, 1993).

[0164] In other embodiments, the RGN fusion protein comprises a deaminase domain that deaminates a nucleobase, resulting in conversion from one nucleobase to another, and includes, but is not limited to, a cytosine deaminase or an adenine deaminase (see, e.g., Gaudelli et al. (2017) Nature 551:464-471, U.S. Publ. Nos. 2017/0121693 and 2018/0073012, and International Publ. No. WO 2018/027078, or any of the deaminases disclosed in International Publ. Nos. WO 2020/139783 and WO 2022/056254, and International Appl. No. PCT/US2022/021271 filed Mar. 22, 2022, each of which is herein incorporated by reference in its entirety. In some embodiments, the effector domain of the RGN fusion protein can be an expression modulator domain, which is a domain that either serves to upregulate or downregulate transcription. The expression modulator domain can be an epigenetic modification domain, a transcriptional repressor domain or a transcriptional activation domain.

[0165] In some of these embodiments, the expression modulator of the RGN fusion protein comprises an epigenetic modification domain that covalently modifies DNA or histone proteins to alter histone structure and/or chromosomal structure without altering the DNA sequence, leading to changes in gene expression (i.e., upregulation or downregulation). Non-limiting examples of epigenetic modifications include acetylation or methylation of lysine residues, arginine methylation, serine and threonine phosphorylation, and lysine ubiquitination and sumoylation of histone proteins, and methylation and hydroxymethylation of cytosine residues in DNA. Non-limiting examples of epigenetic modification domains include histone acetyltransferase domains, histone deacetylase domains, histone methyltransferase domains, histone demethylase domains, DNA methyltransferase domains, and DNA demethylase domains.

[0166] In other embodiments, the expression modulator of the fusion protein comprises a transcriptional repressor domain, which interacts with transcriptional control elements and/or transcriptional regulatory proteins, such as RNA polymerases and transcription factors, to reduce or terminate transcription of at least one gene. Transcriptional repressor domains are known in the art and include, but are not limited to, Sp1-like repressors, IκB, and Kruppel associated box (KRAB) domains.

[0167] In yet other embodiments, the expression modulator of the fusion protein comprises a transcriptional activation domain, which interacts with transcriptional control elements and/or transcriptional regulatory proteins, such as RNA polymerases and transcription factors, to increase or activate transcription of at least one gene. Transcriptional activation domains are known in the art and include, but are not limited to, a herpes simplex virus VP16 activation domain and an NFAT activation domain.

[0168] The presently disclosed RGN polypeptides can comprise a detectable label or a purification tag. The detectable label or purification tag can be located at the N-terminus, the C-terminus, or an internal location of the RNA-guided nuclease, either directly or indirectly via a linker peptide. In some of these embodiments, the RGN component of the fusion protein is a nuclease-dead RGN. In other embodiments, the RGN component of the fusion protein is an RGN with nickase activity.

[0169] A detectable label is a molecule that can be visualized or otherwise observed. The detectable label may be fused to the RGN as a fusion protein (e.g., fluorescent protein) or may be a small molecule conjugated to the RGN polypeptide that can be detected visually or by other means. Detectable labels that can be fused to the presently disclosed RGNs as a fusion protein include any detectable protein domain, including but not limited to, a fluorescent protein or a protein domain that can be detected with a specific antibody. Non-limiting examples of fluorescent proteins include green fluorescent proteins (e.g., GFP, EGFP, ZsGreen1) and yellow fluorescent proteins (e.g., YFP, EYFP, ZsYellow1). Non-limiting examples of small molecule detectable labels include radioactive labels, such as ³H and ³⁵S.

[0170] RGN polypeptides can also comprise a purification tag, which is any molecule that can be utilized to isolate a protein or fused protein from a mixture (e.g., biological sample, culture medium). Non-limiting examples of purification tags include biotin, myc, maltose binding protein (MBP), glutathione-S-transferase (GST), and 3×FLAG tag.

### III. Guide RNA

[0171] The present disclosure provides guide RNAs and polynucleotides encoding the same that target an associated RGN to a target sequence. The term “guide RNA” refers to a nucleotide sequence having sufficient complementarity with a target nucleotide sequence to hybridize with the target sequence and direct sequence-specific binding of an associated RNA-guided nuclease to the target nucleotide sequence. More specifically, when the target nucleotide sequence is double-stranded as is the case with DNA, the target nucleotide sequence is comprised of a target strand (which comprises the PAM sequence) and the non-target strand. In these embodiments, the guide RNA has sufficient complementarity with the non-target strand of a double-stranded target sequence (e.g., target DNA sequence) such that the guide RNA hybridizes with the non-target strand and directs sequence-specific binding of an associated RNA-guided nuclease (RGN) to the target sequence (e.g., target DNA sequence). Therefore, in some embodiments, a guide RNA includes a spacer that is identical to the sequence of the target strand except that uracil (U) replaces thymidine (T) in the guide RNA.

[0172] An RGN's respective guide RNA is one or more RNA molecules (generally, one or two), that can bind to the RGN and guide the RGN to bind to a particular target sequence, and in those embodiments wherein the RGN has nickase or nuclease activity, also cleave the target strand and/or the non-target strand. In general, a guide RNA comprises a CRISPR RNA (crRNA) and a trans-activating CRISPR RNA (tracrRNA), although some RGNs do not require a tracrRNA. Native guide RNAs that comprise both a crRNA and a tracrRNA generally comprise two separate RNA molecules that hybridize to each other through the repeat sequence of the crRNA and the anti-repeat sequence of the tracrRNA.

[0173] The present invention provides CRISPR RNAs (crRNAs) or polynucleotides encoding CRISPR RNAs that together with a tracrRNA, target an associated RGN to a target sequence. A crRNA comprises a spacer and a CRISPR repeat. The “spacer” has a nucleotide sequence that directly hybridizes with the non-target strand of a target sequence (e.g., target DNA sequence) of interest. The spacer is engineered to have full or partial complementarity with the non-target strand of a target sequence of interest. In some embodiments, the spacer can comprise from about 8 nucleotides to about 30 nucleotides, or more. For example, the spacer can be about 8, about 9, about 10, about 11, about 12, about 13, about 14, about 15, about 16, about 17, about 18, about 19, about 20, about 21, about 22, about 23, about 24, about 25, about 26, about 27, about 28, about 29, about 30, or more nucleotides in length. In some embodiments, the spacer is 8, 9, 10, 11, 12, 13, 14, 15, 16, 17, 18, 19, 20, 21, 22, 23, 24, 25, 26, 27, 28, 29, 30, or more nucleotides in length. In some embodiments, the spacer is about 10 to about 26 nucleotides in length, or about 12 to about 30 nucleotides in length. In some embodiments, the degree of complementarity between a spacer and the non-target strand of a target sequence (e.g., target DNA sequence), when optimally aligned using a suitable alignment algorithm, is between 50% and 99% or more, including but not limited to about or more than about 50%, about 60%, about 70%, about 75%, about 80%, about 81%, about 82%, about 83%, about 84%, about 85%, about 86%, about 87%, about 88%, about 89%, about 90%, about 91%, about 92%, about 93%, about 94%, about 95%, about 96%, about 97%, about 98%, about 99%, or more. In some embodiments, the degree of complementarity between a spacer and the non-target strand of a target sequence (e.g., target DNA sequence), when optimally aligned using a suitable alignment algorithm, is 50%, 60%, 70%, 75%, 80%, 81%, 82%, 83%, 84%, 85%, 86%, 87%, 88%, 89%, 90%, 91%, 92%, 93%, 94%, 95%, 96%, 97%, 98%, 99%, or more. In some embodiments, the spacer can be identical in sequence to the target strand of a target sequence. In some of those embodiments wherein the target sequence is a target DNA sequence, the spacer can be identical in sequence to the target strand of the target DNA sequence, with the exception of the thymidines (Ts) in the target strand being replaced by uracils (Us) in the spacer. In particular embodiments, the spacer is free of secondary structure, which can be predicted using any suitable polynucleotide folding algorithm known in the art, including but not limited to mFold (see, e.g., Zuker and Stiegler (1981) Nucleic Acids Res. 9:133-148) and RNAfold (see, e.g., Gruber et al. (2008) Cell 106(1):23-24).

[0174] The presently disclosed crRNAs comprise a spacer capable of targeting a bound RGN polypeptide to a target DNA sequence, wherein the target strand of the target DNA sequence has the nucleotide sequence set forth in any one of SEQ ID NOs: 344-464, 573-641, 667-677, 684-747, 770-817, 826-1039, and 1046-1057.

[0175] Along with a spacer, crRNAs further comprise a CRISPR RNA repeat. The CRISPR RNA repeat comprises a nucleotide sequence that forms a structure, either on its own or in concert with a hybridized tracrRNA, that is recognized by the RGN molecule. In various embodiments, the CRISPR RNA repeat can comprise from about 8 nucleotides to about 30 nucleotides, or more. For example, the CRISPR repeat can be about 8, about 9, about 10, about 11, about 12, about 13, about 14, about 15, about 16, about 17, about 18, about 19, about 20, about 21, about 22, about 23, about 24, about 25, about 26, about 27, about 28, about 29, about 30, or more nucleotides in length. In particular embodiments, the CRISPR repeat is 8, 9, 10, 11, 12, 13, 14, 15, 16, 17, 18, 19, 20, 21, 22, 23, 24, 25, 26, 27, 28, 29, 30, or more nucleotides in length. In some embodiments, the degree of complementarity between a CRISPR repeat and its corresponding tracrRNA sequence, when optimally aligned using a suitable alignment algorithm, is about or more than about 50%, about 60%, about 70%, about 75%, about 80%, about 81%, about 82%, about 83%, about 84%, about 85%, about 86%, about 87%, about 88%, about 89%, about 90%, about 91%, about 92%, about 93%, about 94%, about 95%, about 96%, about 97%, about 98%, about 99%, or more. In particular embodiments, the degree of complementarity between a CRISPR repeat and its corresponding tracrRNA sequence, when optimally aligned using a suitable alignment algorithm, is 50%, 60%, 70%, 75%, 80%, 81%, 82%, 83%, 84%, 85%, 86%, 87%, 88%, 89%, 90%, 91%, 92%, 93%, 94%, 95%, 96%, 97%, 98%, 99%, or more.

[0176] In particular embodiments, the CRISPR repeat comprises the nucleotide sequence of any one of SEQ ID NOs: 21-41, or nucleotides 1-17 of SEQ ID NO: 1041 or 1042, or nucleotides 1-22 of SEQ ID NO: 1044 or 1045, or an active variant or fragment thereof that when comprised within a guide RNA, is capable of directing the sequence-specific binding of an associated RNA-guided nuclease provided herein to a target sequence of interest. In certain embodiments, an active CRISPR repeat variant of a wild-type sequence comprises a nucleotide sequence having at least 40%, 45%, 50%, 55%, 60%, 65%, 70%, 75%, 80%, 85%, 90%, 91%, 92%, 93%, 94%, 95%, 96%, 97%, 98%, 99% or more sequence identity to any one of the nucleotide sequences set forth as SEQ ID NOs: 21-41, or nucleotides 1-17 of SEQ ID NO: 1041 or 1042, or nucleotides 1-22 of SEQ ID NO: 1044 or 1045. In certain embodiments, an active CRISPR repeat fragment of a wild-type sequence comprises at least 5, 6, 7, 8, 9, 10, 11, 12, 13, 14, 15, 16, 17, 18, 19, 20, 21, or 22 contiguous nucleotides of any one of the nucleotide sequences set forth as SEQ ID NOs: 21-41, or nucleotides 1-17 of SEQ ID NO: 1041 or 1042, or nucleotides 1-22 of SEQ ID NO: 1044 or 1045.

[0177] In certain embodiments, the crRNA is not naturally-occurring. In some of these embodiments, the specific CRISPR repeat is not linked to the engineered spacer in nature and the CRISPR repeat is considered heterologous to the spacer. In certain embodiments, the spacer is an engineered sequence that is not naturally occurring.

[0178] Presently disclosed guide RNAs comprise a crRNA and a trans-activating CRISPR RNA (tracrRNA). A tracrRNA molecule comprises a nucleotide sequence comprising a region that has sufficient complementarity to hybridize to a CRISPR repeat of a crRNA, which is referred to herein as the anti-repeat. In some embodiments, the tracrRNA molecule further comprises a region with secondary structure (e.g., stem-loop) or forms secondary structure upon hybridizing with its corresponding crRNA. In particular embodiments, the region of the tracrRNA that is fully or partially complementary to a CRISPR repeat is at the 5′ end of the molecule and the 3′ end of the tracrRNA comprises secondary structure. This region of secondary structure generally comprises several hairpin structures, including the nexus hairpin, which is found adjacent to the anti-repeat. The nexus forms the core of the interactions between the guide RNA and the RGN, and is at the intersection between the guide RNA, the RGN, and the target DNA. The nexus hairpin often has a conserved nucleotide sequence in the base of the hairpin stem, with the motif UNANNC (SEQ ID NO: 566) found in many nexus hairpins in tracrRNAs. In embodiments, guide RNAs or RGN systems of the disclosure use tracrRNAs that comprise non-canonical sequences in the base of the hairpin stem of their nexus hairpins, including UNANNG (SEQ ID NO: 567), CNANNC (SEQ ID NO: 568), CNANNU (SEQ ID NO: 569), UNANNU (SEQ ID NO: 570), CNANNG (SEQ ID NO: 571), and CNCNNU (SEQ ID NO: 572). There are often terminal hairpins at the 3′ end of the tracrRNA that can vary in structure and number, but often comprise a GC-rich Rho-independent transcriptional terminator hairpin followed by a string of U's at the 3′ end. See, for example, Briner et al. (2014) Molecular Cell 56:333-339, Briner and Barrangou (2016) Cold Spring Harb Protoc; doi: 10.1101/pdb.top090902, and U.S. Publication No. 2017/0275648, each of which is herein incorporated by reference in its entirety.

[0179] In various embodiments, the anti-repeat region of the tracrRNA that is fully or partially complementary to the CRISPR repeat comprises from about 8 nucleotides to about 30 nucleotides, or more. For example, the region of base pairing between the tracrRNA anti-repeat and the CRISPR repeat can be about 8, about 9, about 10, about 11, about 12, about 13, about 14, about 15, about 16, about 17, about 18, about 19, about 20, about 21, about 22, about 23, about 24, about 25, about 26, about 27, about 28, about 29, about 30, or more nucleotides in length. In particular embodiments, the region of base pairing between the tracrRNA anti-repeat and the CRISPR repeat is 6, 7, 8, 9, 10, 11, 12, 13, 14, 15, 16, 17, 18, 19, 20, 21, 22, 23, 24, 25, 26, 27, 28, 29, 30, or more nucleotides in length. In some embodiments, the degree of complementarity between a CRISPR repeat and its corresponding tracrRNA anti-repeat, when optimally aligned using a suitable alignment algorithm, is about or more than about 50%, about 60%, about 70%, about 75%, about 80%, about 81%, about 82%, about 83%, about 84%, about 85%, about 86%, about 87%, about 88%, about 89%, about 90%, about 91%, about 92%, about 93%, about 94%, about 95%, about 96%, about 97%, about 98%, about 99%, or more. In particular embodiments, the degree of complementarity between a CRISPR repeat and its corresponding tracrRNA anti-repeat, when optimally aligned using a suitable alignment algorithm, is 50%, 60%, 70%, 75%, 80%, 81%, 82%, 83%, 84%, 85%, 86%, 87%, 88%, 89%, 90%, 91%, 92%, 93%, 94%, 95%, 96%, 97%, 98%, 99%, or more.

[0180] In various embodiments, the entire tracrRNA can comprise from about 60 nucleotides to more than about 210 nucleotides. For example, the tracrRNA can be about 50, about 55, about 60, about 65, about 70, about 75, about 80, about 85, about 90, about 95, about 100, about 105, about 110, about 115, about 120, about 125, about 130, about 135, about 140, about 150, about 160, about 170, about 180, about 190, about 200, about 210, or more nucleotides in length. In particular embodiments, the tracrRNA is 50, 55, 60, 65, 70, 75, 80, 85, 90, 95, 100, 105, 110, 115, 120, 125, 130, 135, 140, 150, 160, 170, 180, 190, 200, 210 or more nucleotides in length. In particular embodiments, the tracrRNA is about 57 to about 115 nucleotides in length, including about 57, about 58, about 59, about 60, about 61, about 62, about 63, about 64, about 65, about 66, about 67, about 68, about 69, about 70, about 71, about 72, about 73, about 74, about 75, about 76, about 77, about 78, about 79, about 80, about 81, about 82, about 83, about 84, about 85, about 86, about 87, about 88, about 89, about 90, about 91, about 92, about 93, about 94, about 95, about 96, about 97, about 98, about 99, about 100, about 101, about 102, about 103, about 104, about 105, about 106, about 107, about 108, about 109, about 110, about 111, about 112, about 113, about 114, and about 115 nucleotides in length. In particular embodiments, the tracrRNA is 59 to 115 nucleotides in length, including 57, 58, 59, 60, 61, 62, 63, 64, 65, 66, 67, 68, 69, 70, 71, 72, 73, 74, 75, 76, 77, 78, 79, 80, 81, 82, 83, 84, 85, 86, 87, 88, 89, 90, 91, 92, 93, 94, 95, 96, 97, 98, 99, 100, 101, 102, 103, 104, 105, 106, 107, 108, 109, 110, 111, 112, 113, 114, and 115 nucleotides in length.

[0181] In particular embodiments, the tracrRNA comprises the nucleotide sequence of any one of SEQ ID NOs: 42-62, nucleotides 19-111 of SEQ ID NO: 1040, nucleotides 22-85 of SEQ ID NO: 1041 or 1042, nucleotides 24-138 of SEQ ID NO: 143, nucleotides 27-96 of SEQ ID NO: 1044, or nucleotides 27-95 of SEQ ID NO: 1045, or an active variant or fragment thereof that when comprised within a guide RNA is capable of directing the sequence-specific binding of an associated RNA-guided nuclease provided herein to a target DNA sequence of interest. In certain embodiments, an active tracrRNA sequence variant comprises a nucleotide sequence having at least 40%, 45%, 50%, 55%, 60%, 65%, 70%, 75%, 80%, 85%, 90%, 91%, 92%, 93%, 94%, 95%, 96%, 97%, 98%, 99% or more sequence identity to any one of the nucleotide sequences set forth as SEQ ID NOs: 42-62, nucleotides 19-111 of SEQ ID NO: 1040, nucleotides 22-85 of SEQ ID NO: 1041 or 1042, nucleotides 24-138 of SEQ ID NO: 143, nucleotides 27-96 of SEQ ID NO: 1044, or nucleotides 27-95 of SEQ ID NO: 1045. In certain embodiments, an active tracrRNA sequence fragment comprises at least 5, 10, 15, 20, 25, 30, 35, 40, 45, 50, 55, 60, 65, 70, 75, 80, or more contiguous nucleotides of any one of the nucleotide sequences set forth as SEQ ID NOs: 42-62, nucleotides 19-111 of SEQ ID NO: 1040, nucleotides 22-85 of SEQ ID NO: 1041 or 1042, nucleotides 24-138 of SEQ ID NO: 143, nucleotides 27-96 of SEQ ID NO: 1044, or nucleotides 27-95 of SEQ ID NO: 1045.

[0182] Two polynucleotide sequences can be considered to be substantially complementary when the two sequences hybridize to each other under stringent conditions. Likewise, an RGN is considered to bind to a particular target sequence within a sequence-specific manner if the guide RNA bound to the RGN binds to a target sequence under stringent conditions. By “stringent conditions” or “stringent hybridization conditions” is intended conditions under which the two polynucleotide sequences will hybridize to each other to a detectably greater degree than to other sequences (e.g., at least 2-fold over background). Stringent conditions are sequence-dependent and will be different in different circumstances. Typically, stringent conditions will be those in which the salt concentration is less than about 1.5 M Na ion, typically about 0.01 to 1.0 M Na ion concentration (or other salts) at pH 7.0 to 8.3, and the temperature is at least about 30° C. for short sequences (e.g., 10 to 50 nucleotides) and at least about 60° C. for long sequences (e.g., greater than 50 nucleotides). Stringent conditions may also be achieved with the addition of destabilizing agents such as formamide. Exemplary low stringency conditions include hybridization with a buffer solution of 30 to 35% formamide, 1 M NaCl, 1% SDS (sodium dodecyl sulfate) at 37° C., and a wash in 1× to 2×SSC (20×SSC=3.0 M NaCl/0.3 M trisodium citrate) at 50 to 55° C. Exemplary moderate stringency conditions include hybridization in 40 to 45% formamide, 1.0 M NaCl, 1% SDS at 37° C., and a wash in 0.5× to 1×SSC at 55 to 60° C. Exemplary high stringency conditions include hybridization in 50% formamide, 1 M NaCl, 1% SDS at 37° C., and a wash in 0.1×SSC at 60 to 65° C. Optionally, wash buffers may comprise about 0.1% to about 1% SDS. Duration of hybridization is generally less than about 24 hours, usually about 4 to about 12 hours. The duration of the wash time will be at least a length of time sufficient to reach equilibrium.

[0183] The Tm is the temperature (under defined ionic strength and pH) at which 50% of a complementary target sequence hybridizes to a perfectly matched sequence. For DNA-DNA hybrids, the Tm can be approximated from the equation of Meinkoth and Wahl (1984) Anal. Biochem. 138:267-284: Tm=81.5° C.+16.6 (log M)+0.41 (% GC)−0.61 (% form)−500/L; where M is the molarity of monovalent cations, % GC is the percentage of guanosine and cytosine nucleotides in the DNA, % form is the percentage of formamide in the hybridization solution, and L is the length of the hybrid in base pairs. Generally, stringent conditions are selected to be about 5° C. lower than the thermal melting point (Tm) for the specific sequence and its complement at a defined ionic strength and pH. However, severely stringent conditions can utilize a hybridization and/or wash at 1, 2, 3, or 4° C. lower than the thermal melting point (Tm); moderately stringent conditions can utilize a hybridization and/or wash at 6, 7, 8, 9, or 10° C. lower than the thermal melting point (Tm); low stringency conditions can utilize a hybridization and/or wash at 11, 12, 13, 14, 15, or 20° C. lower than the thermal melting point (Tm). Using the equation, hybridization and wash compositions, and desired Tm, those of ordinary skill will understand that variations in the stringency of hybridization and/or wash solutions are inherently described. An extensive guide to the hybridization of nucleic acids is found in Tijssen (1993) Laboratory Techniques in Biochemistry and Molecular Biology-Hybridization with Nucleic Acid Probes, Part I, Chapter 2 (Elsevier, New York); and Ausubel et al., eds. (1995) Current Protocols in Molecular Biology, Chapter 2 (Greene Publishing and Wiley-Interscience, New York). See Sambrook et al. (1989) Molecular Cloning: A Laboratory Manual (2d ed., Cold Spring Harbor Laboratory Press, Plainview, New York).

[0184] The term “sequence specific” can also refer to the binding of a RGN polypeptide to a target sequence at a greater frequency than binding to a randomized background sequence.

[0185] The guide RNA can be a single guide RNA (sgRNA) or a dual-guide RNA. A single guide RNA comprises the crRNA and tracrRNA on a single molecule of RNA, whereas a dual-guide RNA comprises a crRNA and a tracrRNA present on two distinct RNA molecules, hybridized to one another through at least a portion of the CRISPR repeat of the crRNA and at least a portion of the tracrRNA (i.e., the antirepeat), which may be fully or partially complementary to the CRISPR repeat of the crRNA. In some of those embodiments wherein the guide RNA is a single guide RNA, the crRNA and tracrRNA are separated by a linker nucleotide sequence. In general, the linker nucleotide sequence is one that does not include complementary bases in order to avoid the formation of secondary structure within or comprising nucleotides of the linker nucleotide sequence. In some embodiments, the linker nucleotide sequence between the crRNA and tracrRNA is at least 3, at least 4, at least 5, at least 6, at least 7, at least 8, at least 9, at least 10, at least 11, at least 12, or more nucleotides in length. In particular embodiments, the linker nucleotide sequence of a single guide RNA is at least 4 nucleotides in length. In certain embodiments, the linker nucleotide sequence is the nucleotide sequence set forth as SEQ ID NO: 84.

[0186] The single guide RNA or dual-guide RNA can be synthesized chemically or via in vitro transcription. Assays for determining sequence-specific binding between an RGN and a guide RNA are known in the art and include, but are not limited to, in vitro binding assays between an expressed RGN and the guide RNA, which can be tagged with a detectable label (e.g., biotin) and used in a pull-down detection assay in which the guide RNA:RGN complex is captured via the detectable label (e.g., with streptavidin beads). A control guide RNA with an unrelated sequence or structure to the guide RNA can be used as a negative control for non-specific binding of the RGN to RNA. In certain embodiments, the guide RNA has a backbone sequence that is any one of SEQ ID NOs: 63-83, 1040, 1041, 1042, 1043, 1044, or 1045.

[0187] In certain embodiments, the guide RNA can be introduced into a target cell, organelle, or embryo as an RNA molecule. The guide RNA can be transcribed in vitro or chemically synthesized. In other embodiments, a nucleotide sequence encoding the guide RNA is introduced into the cell, or embryo. In some of these embodiments, the nucleotide sequence encoding the guide RNA is operably linked to a promoter (e.g., an RNA polymerase III promoter). The promoter can be a native promoter or heterologous to the guide RNA-encoding nucleotide sequence.

[0188] In various embodiments, the guide RNA can be introduced into a target cell, organelle, or embryo as a ribonucleoprotein complex, as described herein, wherein the guide RNA is bound to an RNA-guided nuclease polypeptide.

[0189] The guide RNA directs an associated RGN to a particular target nucleotide sequence of interest through hybridization of the guide RNA to the target sequence of interest. The target sequence can be bound (and in some embodiments, cleaved) by an RNA-guided nuclease in vitro or in a cell. A target sequence is within a target polynucleotide and can comprise DNA, RNA, or a combination of both and can be single-stranded or double-stranded. A target sequence can be genomic DNA (i.e., chromosomal DNA), plasmid DNA, or an RNA molecule (e.g., messenger RNA, ribosomal RNA, transfer RNA, micro RNA, small interfering RNA). In those embodiments wherein the target sequence is a chromosomal sequence, the chromosomal sequence can be a nuclear, plastid, or mitochondrial chromosomal sequence. In the presently disclosed compositions and methods, the target sequence is within a target nucleic acid molecule that is double-stranded (e.g., a target DNA sequence. In embodiments, the target sequence is unique in the target genome.

[0190] The target sequence is adjacent to a protospacer adjacent motif (PAM) and the target strand of the target sequence is the strand that comprises the PAM. The PAM is immediately adjacent to the target sequence and often comprise Ns, which represent any nucleotide. In some embodiments, the protospacer adjacent motif comprises about 1 to about 10 Ns, including about 1, about 2, about 3, about 4, about 5, about 6, about 7, about 8, about 9, or about 10 nucleotides. In particular embodiments, a PAM comprises 1 to 10 Ns, including 1, 2, 3, 4, 5, 6, 7, 8, 9, or 10 Ns. The PAM can be 5′ or 3′ of the target sequence on its target strand. The PAM of the presently disclosed RGNs is immediately 3′ of the target sequence on its target strand. Generally, the PAM is a consensus sequence of about 3-4 nucleotides, but in particular embodiments it can be 2, 3, 4, 5, 6, 7, 8, 9, or more nucleotides in length. In various embodiments, the PAM sequence recognized by the presently disclosed RGNs comprises the consensus sequence set forth in any one of SEQ ID NOs: 127-147. In some embodiments of the above aspect, the crRNA is capable of binding to an RGN polypeptide capable of recognizing a full protospacer adjacent motif (PAM) having the nucleotide sequence set forth in any one of SEQ ID NOs: 127-147.

[0191] In particular embodiments, an RNA-guided nuclease having any one of SEQ ID NOs: 1-20 or an active variant or fragment thereof binds a target nucleotide sequence adjacent to a PAM sequence set forth as any one of SEQ ID NOs: 127-147. In some embodiments, the RGN binds to a guide RNA comprising a CRISPR repeat having a nucleotide sequence set forth in any one of SEQ ID NOs: 21-41, or nucleotides 1-17 of SEQ ID NO: 1041 or 1042, or nucleotides 1-22 of SEQ ID NO: 1044 or 1045, or an active variant or fragment thereof, and a tracrRNA having a nucleotide sequence set forth in any one of SEQ ID NOs: 42-62, or nucleotides 19-111 of SEQ ID NO: 1040, nucleotides 22-85 of SEQ ID NO: 1041 or 1042, nucleotides 24-138 of SEQ ID NO: 143, nucleotides 27-96 of SEQ ID NO: 1044, or nucleotides 27-95 of SEQ ID NO: 1045, or an active variant or fragment thereof. The RGN systems are described further in Examples 1-3 and Tables 1 and 2 of the present specification.

[0192] In some embodiments, an RNA-guided nuclease having SEQ ID NO: 1 or an active variant or fragment thereof binds a target nucleotide sequence adjacent to a PAM sequence set forth as SEQ ID NO: 127, when bound to a guide RNA comprising a CRISPR repeat sequence set forth as SEQ ID NO: 21 or an active variant or fragment thereof and a tracrRNA sequence set forth as SEQ ID NO: 42 or an active variant or fragment thereof.

[0193] In some embodiments, an RNA-guided nuclease having SEQ ID NO: 2 or an active variant or fragment thereof binds a target nucleotide sequence adjacent to a PAM sequence set forth as any one of SEQ ID NOs: 128-131, when bound to a guide RNA comprising a CRISPR repeat sequence set forth as SEQ ID NO: 22 or an active variant or fragment thereof and a tracrRNA sequence set forth as SEQ ID NO: 43 or an active variant or fragment thereof.

[0194] In some embodiments, an RNA-guided nuclease having SEQ ID NO: 3 or an active variant or fragment thereof binds a target nucleotide sequence adjacent to a PAM sequence set forth as SEQ ID NO: 132, when bound to a guide RNA comprising a CRISPR repeat sequence set forth as SEQ ID NO: 23 or an active variant or fragment thereof and a tracrRNA sequence set forth as SEQ ID NO: 44 or nucleotides 19-111 of SEQ ID NO: 1040 or an active variant or fragment thereof.

[0195] In some embodiments, an RNA-guided nuclease having SEQ ID NO: 4 or an active variant or fragment thereof binds a target nucleotide sequence adjacent to a PAM sequence set forth as SEQ ID NO: 132, when bound to a guide RNA comprising a CRISPR repeat sequence set forth as SEQ ID NO: 24 or an active variant or fragment thereof and a tracrRNA sequence set forth as SEQ ID NO: 45 or an active variant or fragment thereof.

[0196] In some embodiments, an RNA-guided nuclease having SEQ ID NO: 5 or an active variant or fragment thereof binds a target nucleotide sequence adjacent to a PAM sequence set forth as SEQ ID NO: 133, when bound to a guide RNA comprising a CRISPR repeat sequence set forth as SEQ ID NO: 25 or nucleotides 1-17 of SEQ ID NO: 1041 or 1042 or an active variant or fragment thereof and a tracrRNA sequence set forth as SEQ ID NO: 46 or nucleotides 22-85 of SEQ ID NO: 1041 or 1042 or an active variant or fragment thereof.

[0197] In some embodiments, an RNA-guided nuclease having SEQ ID NO: 6 or an active variant or fragment thereof binds a target nucleotide sequence adjacent to a PAM sequence set forth as SEQ ID NO: 134, when bound to a guide RNA comprising a CRISPR repeat sequence set forth as SEQ ID NO: 26 or an active variant or fragment thereof and a tracrRNA sequence set forth as SEQ ID NO: 47 or nucleotides 24-138 of SEQ ID NO: 1043 or an active variant or fragment thereof.

[0198] In some embodiments, an RNA-guided nuclease having SEQ ID NO: 7 or an active variant or fragment thereof binds a target nucleotide sequence adjacent to a PAM sequence set forth as SEQ ID NO: 135, when bound to a guide RNA comprising a CRISPR repeat sequence set forth as SEQ ID NO: 27 or nucleotides 1-22 of SEQ ID NO: 1044 or 1045 or an active variant or fragment thereof and a tracrRNA sequence set forth as SEQ ID NO: 48 or nucleotides 27-96 of SEQ ID NO: 1044 or nucleotides 27-95 of SEQ ID NO: 1045 or an active variant or fragment thereof.

[0199] In some embodiments, an RNA-guided nuclease having SEQ ID NO: 8 or an active variant or fragment thereof binds a target nucleotide sequence adjacent to a PAM sequence set forth as SEQ ID NO: 136 or 137, when bound to a guide RNA comprising a CRISPR repeat sequence set forth as SEQ ID NO: 28 or an active variant or fragment thereof and a tracrRNA sequence set forth as SEQ ID NO: 49 or an active variant or fragment thereof.

[0200] In some embodiments, an RNA-guided nuclease having SEQ ID NO: 9 or an active variant or fragment thereof binds a target nucleotide sequence adjacent to a PAM sequence set forth as SEQ ID NO: 138, when bound to a guide RNA comprising a CRISPR repeat sequence set forth as SEQ ID NO: 29 or an active variant or fragment thereof and a tracrRNA sequence set forth as SEQ ID NO: 50 or an active variant or fragment thereof.

[0201] In some embodiments, an RNA-guided nuclease having SEQ ID NO: 10 or an active variant or fragment thereof binds a target nucleotide sequence adjacent to a PAM sequence set forth as SEQ ID NO: 139, when bound to a guide RNA comprising a CRISPR repeat sequence set forth as SEQ ID NO: 30 or an active variant or fragment thereof and a tracrRNA sequence set forth as SEQ ID NO: 51 or an active variant or fragment thereof.

[0202] In some embodiments, an RNA-guided nuclease having SEQ ID NO: 11 or an active variant or fragment thereof binds a target nucleotide sequence adjacent to a PAM sequence set forth as SEQ ID NO: 140, when bound to a guide RNA comprising a CRISPR repeat sequence set forth as SEQ ID NO: 31 or an active variant or fragment thereof and a tracrRNA sequence set forth as SEQ ID NO: 52 or an active variant or fragment thereof.

[0203] In some embodiments, an RNA-guided nuclease having SEQ ID NO: 12 or an active variant or fragment thereof binds a target nucleotide sequence adjacent to a PAM sequence set forth as SEQ ID NO: 141, when bound to a guide RNA comprising a CRISPR repeat sequence set forth as SEQ ID NO: 32 or an active variant or fragment thereof and a tracrRNA sequence set forth as SEQ ID NO: 53 or an active variant or fragment thereof.

[0204] In some embodiments, an RNA-guided nuclease having SEQ ID NO: 13 or an active variant or fragment thereof binds a target nucleotide sequence adjacent to a PAM sequence set forth as SEQ ID NO: 142, when bound to a guide RNA comprising a CRISPR repeat sequence set forth as SEQ ID NO: 33 or an active variant or fragment thereof and a tracrRNA sequence set forth as SEQ ID NO: 54 or an active variant or fragment thereof.

[0205] In some embodiments, an RNA-guided nuclease having SEQ ID NO: 14 or an active variant or fragment thereof binds a target nucleotide sequence adjacent to a PAM sequence set forth as SEQ ID NO: 143, when bound to a guide RNA comprising a CRISPR repeat sequence set forth as SEQ ID NO: 34 or an active variant or fragment thereof and a tracrRNA sequence set forth as SEQ ID NO: 55 or an active variant or fragment thereof.

[0206] In some embodiments, an RNA-guided nuclease having SEQ ID NO: 15 or an active variant or fragment thereof binds a target nucleotide sequence adjacent to a PAM sequence set forth as SEQ ID NO: 144, when bound to a guide RNA comprising a CRISPR repeat sequence set forth as SEQ ID NO: 35 or an active variant or fragment thereof and a tracrRNA sequence set forth as SEQ ID NO: 56 or an active variant or fragment thereof.

[0207] In some embodiments, an RNA-guided nuclease having SEQ ID NO: 16 or an active variant or fragment thereof binds a target nucleotide sequence adjacent to a PAM sequence set forth as SEQ ID NO: 145, when bound to a guide RNA comprising a CRISPR repeat sequence set forth as SEQ ID NO: 36 or an active variant or fragment thereof and a tracrRNA sequence set forth as SEQ ID NO: 57 or an active variant or fragment thereof.

[0208] In some embodiments, an RNA-guided nuclease having SEQ ID NO: 17 or an active variant or fragment thereof binds a target nucleotide sequence adjacent to a PAM sequence set forth as SEQ ID NO: 146, when bound to a guide RNA comprising a CRISPR repeat sequence set forth as SEQ ID NO: 37 or an active variant or fragment thereof and a tracrRNA sequence set forth as SEQ ID NO: 58 or an active variant or fragment thereof.

[0209] In some embodiments, an RNA-guided nuclease having SEQ ID NO: 18 or an active variant or fragment thereof binds a target nucleotide sequence adjacent to a PAM sequence set forth as SEQ ID NO: 146, when bound to a guide RNA comprising a CRISPR repeat sequence set forth as SEQ ID NO: 38 or an active variant or fragment thereof and a tracrRNA sequence set forth as SEQ ID NO: 59 or an active variant or fragment thereof. In some other embodiments, an RNA-guided nuclease having SEQ ID NO: 18 or an active variant or fragment thereof binds a target nucleotide sequence adjacent to a PAM sequence set forth as SEQ ID NO: 146, when bound to a guide RNA comprising a CRISPR repeat sequence set forth as SEQ ID NO: 39 or an active variant or fragment thereof and a tracrRNA sequence set forth as SEQ ID NO: 60 or an active variant or fragment thereof.

[0210] In some embodiments, an RNA-guided nuclease having SEQ ID NO: 19 or an active variant or fragment thereof binds a target nucleotide sequence adjacent to a PAM sequence set forth as SEQ ID NO: 132, when bound to a guide RNA comprising a CRISPR repeat sequence set forth as SEQ ID NO: 40 or an active variant or fragment thereof and a tracrRNA sequence set forth as SEQ ID NO: 61 or an active variant or fragment thereof.

[0211] In some embodiments, an RNA-guided nuclease having SEQ ID NO: 20 or an active variant or fragment thereof binds a target nucleotide sequence adjacent to a PAM sequence set forth as SEQ ID NO: 146 or 147, when bound to a guide RNA comprising a CRISPR repeat sequence set forth as SEQ ID NO: 41 or an active variant or fragment thereof and a tracrRNA sequence set forth as SEQ ID NO:62 or an active variant or fragment thereof. It is well-known in the art that PAM sequence specificity for a given nuclease enzyme is affected by enzyme concentration (see, e.g., Karvelis et al. (2015) Genome Biol 16:253), which may be modified by altering the promoter used to express the RGN, or the amount of ribonucleoprotein complex delivered to the cell, or embryo.

[0212] Upon recognizing its corresponding PAM sequence, the RGN can cleave one or both strands of a target DNA sequence at a specific cleavage site. As used herein, a cleavage site is made up of the two particular nucleotides within a target DNA sequence between which the strand of a target DNA locus is cleaved by an RGN. The cleavage site can comprise the 1^{st} and 2^{nd}, 2^{nd} and 3^{rd}, 3^{rd} and 4^{th}, 4^{th} and 5^{th}, 5^{th} and 6^{th}, 7^{th}, and 8^{th}, or 8^{th} and 9^{th} nucleotides from the PAM in either the 5′ or 3′ direction. In some embodiments, the cleavage site may be over 10, 11, 12, 13, 14, 15, 16, 17, 18, 19, or 20 nucleotides from the PAM in either the 5′ or 3′ direction. As RGNs can cleave a target DNA sequence resulting in staggered ends, in some embodiments, the cleavage site is defined based on the distance of the two nucleotides from the PAM on the target strand of the target DNA sequence and for the non-target strand, the distance of the two nucleotides from the complement of the PAM.

### IV. Nucleotides Encoding RNA-Guided Nucleases, CRISPR RNA, and or tracrRNA

[0213] The present disclosure provides polynucleotides comprising the presently disclosed CRISPR RNAs, tracrRNAs, and/or gRNAs and polynucleotides comprising a nucleotide sequence encoding the presently disclosed RNA-guided nucleases, CRISPR RNAs, tracrRNAs, and/or gRNAs. Presently disclosed polynucleotides include those comprising or encoding a crRNA comprising a CRISPR repeat sequence having any one of the nucleotide sequences set forth as SEQ ID NOs: 21-41, or nucleotides 1-17 of SEQ ID NO: 1041 or 1042, or nucleotides 1-22 of SEQ ID NO: 1044 or 1045, or an active variant or fragment thereof that when comprised within a guide RNA is capable of directing the sequence-specific binding of an associated RNA-guided nuclease to a target sequence of interest. Also disclosed are polynucleotides comprising or encoding a tracrRNA having any one of the nucleotide sequences set forth as SEQ ID NOs: 42-62, nucleotides 19-111 of SEQ ID NO: 1040, nucleotides 22-85 of SEQ ID NO: 1041 or 1042, nucleotides 24-138 of SEQ ID NO: 143, nucleotides 27-96 of SEQ ID NO: 1044, or nucleotides 27-95 of SEQ ID NO: 1045, or an active variant or fragment thereof that when comprised within a guide RNA is capable of directing the sequence-specific binding of an associated RNA-guided nuclease to a target sequence of interest. Polynucleotides are also provided that encode an RNA-guided nuclease having any one of the amino acid sequences set forth as SEQ ID NOs: 1-20, and active fragments or variants thereof that retain the ability to bind to a target sequence in an RNA-guided sequence-specific manner.

[0214] The use of the term “polynucleotide” or “nucleic acid molecule” is not intended to limit the present disclosure to polynucleotides comprising DNA. Those of ordinary skill in the art will recognize that polynucleotides can comprise ribonucleotides (RNA) and combinations of ribonucleotides and deoxyribonucleotides. Such deoxyribonucleotides and ribonucleotides include both naturally occurring molecules and synthetic analogues. These include peptide nucleic acids (PNAs), PNA-DNA chimers, locked nucleic acids (LNAs), and phosphothioate linked sequences. The polynucleotides disclosed herein also encompass all forms of sequences including, but not limited to, single-stranded forms, double-stranded forms, DNA-RNA hybrids, triplex structures, stem-and-loop structures, and the like.

[0215] In some embodiments, the polynucleotide encoding a presently disclosed RGN is an mRNA (messenger RNA) molecule. An mRNA refers to any polynucleotide which encodes a polypeptide of interest and which is capable of being translated to produce the encoded polypeptide of interest in vitro, in vivo, in situ, or ex vivo. In embodiments, the basic components of an mRNA molecule include at least a coding region, a 5′UTR, a 3′UTR, a 5′ cap and a poly-A tail. In embodiments, an mRNA encoding an RGN useful in the presently disclosed methods and compositions can include one or more structural and/or chemical modifications or alterations which impart useful properties to the polynucleotide. For instance, a useful property of an mRNA includes the lack of a substantial induction of the innate immune response of a cell into which the mRNA is introduced. A “structural” feature or modification is one in which two or more linked nucleotides are inserted, deleted, duplicated, inverted or randomized in an mRNA without significant chemical modification to the nucleotides themselves. Because chemical bonds will necessarily be broken and reformed to effect a structural modification, structural modifications are of a chemical nature and hence are chemical modifications. However, structural modifications will result in a different sequence of nucleotides. Chemical modifications to mRNA can involve inclusion of 5-methylcytosine, N1-methyl-pseudouridine, pseudouridine, 2-thiouridine, 4-thiouridine, 5-methoxyuridine, 2′Fluoroguanosine, 2′Fluorouridine, 5-bromouridine, 5-(2-carbomethoxyvinyl) uridine, 5-[3(1-E-propenylamino)]uridine, α-thiocytidine, N6-methyladenosine, 5-methylcytidine, N4-acetylcytidine, 5-formylcytidine, or combinations thereof, in an mRNA.

[0216] The nucleic acid molecules encoding RGNs can be codon optimized for expression in an organism of interest. A “codon-optimized” coding sequence is a polynucleotide coding sequence having its frequency of codon usage designed to mimic the frequency of preferred codon usage or transcription conditions of a particular host cell. Expression in the particular host cell or organism is enhanced as a result of the alteration of one or more codons at the nucleic acid level such that the translated amino acid sequence is not changed. Nucleic acid molecules can be codon optimized, either wholly or in part. Codon tables and other references providing preference information for a wide range of organisms are available in the art (see, e.g., Campbell and Gown (1990) Plant Physiol. 92:1-11 for a discussion of plant-preferred codon usage). Methods are available in the art for synthesizing plant-preferred genes or mammalian (for example human) codon-optimized coding sequences. See, for example, U.S. Pat. Nos. 5,380,831, and 5,436,391, and Murray et al. (1989) Nucleic Acids Res. 17:477-498, herein incorporated by reference. Non-limiting examples of codon-optimized coding sequences for the presently disclosed RGNs are set forth as SEQ ID NOs: 148-167.

[0217] Polynucleotides encoding the RGNs, crRNAs, tracrRNAs, and/or gRNAs provided herein can be provided in expression cassettes for in vitro expression or expression in a cell, organelle, embryo, or organism of interest. The cassette will include 5′ and 3′ regulatory sequences operably linked to a polynucleotide encoding an RGN, crRNA, tracrRNAs, and/or gRNAs provided herein that allows for expression of the polynucleotide. The cassette may additionally contain at least one additional gene or genetic element to be cotransformed into the organism. Where additional genes or elements are included, the components are operably linked. The term “operably linked” is intended to mean a functional linkage between two or more elements. For example, an operable linkage between a promoter and a coding region of interest (e.g., region coding for an RGN, crRNA, tracrRNAs, and/or gRNAs) is a functional link that allows for expression of the coding region of interest. Operably linked elements may be contiguous or non-contiguous. When used to refer to the joining of two protein coding regions, by operably linked is intended that the coding regions are in the same reading frame. Alternatively, the additional gene(s) or element(s) can be provided on multiple expression cassettes. For example, the nucleotide sequence encoding a presently disclosed RGN can be present on one expression cassette, whereas the nucleotide sequence encoding a crRNA, tracrRNA, or guide RNA can be on a separate expression cassette. Such an expression cassette is provided with a plurality of restriction sites and/or recombination sites for insertion of the polynucleotides to be under the transcriptional regulation of the regulatory regions. The expression cassette may additionally contain a selectable marker gene.

[0218] The expression cassette will include in the 5′-3′ direction of transcription, a transcriptional (and, in some embodiments, translational) initiation region (i.e., a promoter), an RGN-, crRNA-, tracrRNA- and/or sgRNA-encoding polynucleotide of the invention, and a transcriptional (and in some embodiments, translational) termination region (i.e., termination region) functional in the organism of interest. The promoters of the invention are capable of directing or driving expression of a coding sequence in a host cell. The regulatory regions (e.g., promoters, transcriptional regulatory regions, and translational termination regions) may be endogenous or heterologous to the host cell or to each other. As used herein, “heterologous” in reference to a sequence is a sequence that originates from a foreign species, or, if from the same species, is substantially modified from its native form in composition and/or genomic locus by deliberate human intervention. As used herein, a chimeric gene comprises a coding sequence operably linked to a transcription initiation region that is heterologous to the coding sequence.

[0219] Convenient termination regions are available from the Ti-plasmid of A. tumefaciens, such as the octopine synthase and nopaline synthase termination regions. See also Guerineau et al. (1991) Mol. Gen. Genet. 262:141-144; Proudfoot (1991) Cell 64:671-674; Sanfacon et al. (1991) Genes Dev. 5:141-149; Mogen et al. (1990) Plant Cell 2:1261-1272; Munroe et al. (1990) Gene 91:151-158; Ballas et al. (1989) Nucleic Acids Res. 17:7891-7903; and Joshi et al. (1987) Nucleic Acids Res. 15:9627-9639.

[0220] Additional regulatory signals include, but are not limited to, transcriptional initiation start sites, operators, activators, enhancers, other regulatory elements, ribosomal binding sites, an initiation codon, termination signals, and the like. See, for example, U.S. Pat. Nos. 5,039,523 and 4,853,331; EPO 0480762A2; Sambrook et al. (1992) Molecular Cloning: A Laboratory Manual, ed. Maniatis et al. (Cold Spring Harbor Laboratory Press, Cold Spring Harbor, N.Y.), hereinafter “Sambrook 11”; Davis et al., eds. (1980) Advanced Bacterial Genetics (Cold Spring Harbor Laboratory Press), Cold Spring Harbor, N.Y., and the references cited therein.

[0221] In preparing the expression cassette, the various DNA fragments may be manipulated, so as to provide for the DNA sequences in the proper orientation and, as appropriate, in the proper reading frame. Toward this end, adapters or linkers may be employed to join the DNA fragments or other manipulations may be involved to provide for convenient restriction sites, removal of superfluous DNA, removal of restriction sites, or the like. For this purpose, in vitro mutagenesis, primer repair, restriction, annealing, resubstitutions, e.g., transitions and transversions, may be involved.

[0222] A number of promoters can be used in the practice of the invention. The promoters can be selected based on the desired outcome. The nucleic acids can be combined with constitutive, inducible, growth stage-specific, cell type-specific, tissue-preferred, tissue-specific, or other promoters for expression in the organism of interest. See, for example, promoters set forth in WO 99/43838 and in U.S. Pat. Nos. 8,575,425; 7,790,846; 8,147,856; 8,586832; 7,772,369; 7,534,939; 6,072,050; 5,659,026; 5,608,149; 5,608,144; 5,604,121; 5,569,597; 5,466,785; 5,399,680; 5,268,463; 5,608,142; and 6,177,611; herein incorporated by reference.

[0223] For expression in plants, constitutive promoters also include CaMV 35S promoter (Odell et al. (1985) Nature 313:810-812); rice actin (McElroy et al. (1990) Plant Cell 2:163-171); ubiquitin (Christensen et al. (1989) Plant Mol. Biol. 12:619-632 and Christensen et al. (1992) Plant Mol. Biol. 18:675-689); pEMU (Last et al. (1991) Theor. Appl. Genet. 81:581-588); and MAS (Velten et al. (1984) EMBO J. 3:2723-2730).

[0224] Examples of inducible promoters are the Adh1 promoter which is inducible by hypoxia or cold stress, the Hsp70 promoter which is inducible by heat stress, the PPDK promoter and the pepcarboxylase promoter which are both inducible by light. Also useful are promoters which are chemically inducible, such as the In2-2 promoter which is safener induced (U.S. Pat. No. 5,364,780), the Axig1 promoter which is auxin induced and tapetum specific but also active in callus (PCT US01/22169), the steroid-responsive promoters (see, for example, the ERE promoter which is estrogen induced, and the glucocorticoid-inducible promoter in Schena et al. (1991) Proc. Natl. Acad. Sci. USA 88:10421-10425 and McNellis et al. (1998) Plant J. 14(2):247-257) and tetracycline-inducible and tetracycline-repressible promoters (see, for example, Gatz et al. (1991) Mol. Gen. Genet. 227:229-237, and U.S. Pat. Nos. 5,814,618 and 5,789,156), herein incorporated by reference.

[0225] Tissue-specific or tissue-preferred promoters can be utilized to target expression of an expression construct within a particular tissue. In certain embodiments, the tissue-specific or tissue-preferred promoters are active in plant tissue. Examples of promoters under developmental control in plants include promoters that initiate transcription preferentially in certain tissues, such as leaves, roots, fruit, seeds, or flowers. A “tissue specific” promoter is a promoter that initiates transcription only in certain tissues. Unlike constitutive expression of genes, tissue-specific expression is the result of several interacting levels of gene regulation. As such, promoters from homologous or closely related plant species can be preferable to use to achieve efficient and reliable expression of transgenes in particular tissues. In some embodiments, the expression comprises a tissue-preferred promoter. A “tissue preferred” promoter is a promoter that initiates transcription preferentially, but not necessarily entirely or solely in certain tissues.

[0226] In some embodiments, the nucleic acid molecules encoding an RGN, crRNA, and/or tracrRNA comprise a cell type-specific promoter. A “cell type specific” promoter is a promoter that primarily drives expression in certain cell types in one or more organs. Some examples of plant cells in which cell type specific promoters functional in plants may be primarily active include, for example, BETL cells, vascular cells in roots, leaves, stalk cells, and stem cells. The nucleic acid molecules can also include cell type preferred promoters. A “cell type preferred” promoter is a promoter that primarily drives expression mostly, but not necessarily entirely or solely in certain cell types in one or more organs. Some examples of plant cells in which cell type preferred promoters functional in plants may be preferentially active include, for example, BETL cells, vascular cells in roots, leaves, stalk cells, and stem cells.

[0227] The nucleic acid sequences encoding the RGNs, crRNAs, tracrRNAs, and/or gRNAs can be operably linked to a promoter sequence that is recognized by a phage RNA polymerase for example, for in vitro mRNA synthesis. In such embodiments, the in vitro-transcribed RNA can be purified for use in the methods described herein. For example, the promoter sequence can be a T7, T3, or SP6 promoter sequence or a variation of a T7, T3, or SP6 promoter sequence. In such embodiments, the expressed protein and/or RNAs can be purified for use in the methods of genome modification described herein.

[0228] In certain embodiments, the polynucleotide encoding the RGN, crRNA, tracrRNA, and/or gRNA also can be linked to a polyadenylation signal (e.g., SV40 polyA signal and other signals functional in plants) and/or at least one transcriptional termination sequence. Additionally, the sequence encoding the RGN also can be linked to sequence(s) encoding at least one nuclear localization signal, at least one cell-penetrating domain, and/or at least one signal peptide capable of trafficking proteins to particular subcellular locations, as described elsewhere herein.

[0229] The polynucleotide encoding the RGN, crRNA, tracrRNA, and/or gRNA can be present in a vector or multiple vectors. A “vector” refers to a polynucleotide composition for transferring, delivering, or introducing a nucleic acid into a host cell. Suitable vectors include plasmid vectors, phagemids, cosmids, artificial/mini-chromosomes, transposons, and viral vectors (e.g., lentiviral vectors, adeno-associated viral vectors, baculoviral vector). The vector can comprise additional expression control sequences (e.g., enhancer sequences, Kozak sequences, polyadenylation sequences, transcriptional termination sequences), selectable marker sequences (e.g., antibiotic resistance genes), origins of replication, and the like. Additional information can be found in “Current Protocols in Molecular Biology” Ausubel et al., John Wiley & Sons, New York, 2003 or “Molecular Cloning: A Laboratory Manual” Sambrook & Russell, Cold Spring Harbor Press, Cold Spring Harbor, N.Y., 3rd edition, 2001.

[0230] The vector can also comprise a selectable marker gene for the selection of transformed cells. Selectable marker genes are utilized for the selection of transformed cells or tissues. Marker genes include genes encoding antibiotic resistance, such as those encoding neomycin phosphotransferase II (NEO) and hygromycin phosphotransferase (HPT), as well as genes conferring resistance to herbicidal compounds, such as glufosinate ammonium, bromoxynil, imidazolinones, and 2,4-dichlorophenoxyacetate (2,4-D).

[0231] In some embodiments, the expression cassette or vector comprising the sequence encoding the RGN polypeptide can further comprise a sequence encoding a crRNA and/or a tracrRNA, or the crRNA and tracrRNA combined to create a gRNA. The sequence(s) encoding the crRNA and/or tracrRNA can be operably linked to at least one transcriptional control sequence for expression of the crRNA and/or tracrRNA in the organism or host cell of interest. For example, the polynucleotide encoding the crRNA and/or tracrRNA can be operably linked to a promoter sequence that is recognized by RNA polymerase III (Pol III). Examples of suitable Pol III promoters include, but are not limited to, mammalian U6, U3, H1, and 7SL RNA promoters and rice U6 and U3 promoters, such as the human U6 promoter set forth as SEQ ID NO: 173, as well as the promoters disclosed in U.S. Provisional Appl. No. 63/209,660, filed Jun. 11, 2021, and PCT International Appl. No. PCT/US2022/032940, filed Jun. 10, 2022, each of which is herein incorporated by reference in its entirety, including those set forth herein as SEQ ID NOs: 553-562.

[0232] As indicated, expression constructs comprising nucleotide sequences encoding the RGNs, crRNA, tracrRNA, and/or gRNA can be used to transform organisms of interest. Methods for transformation involve introducing a nucleotide construct into an organism of interest. By “introducing” is intended to introduce the nucleotide construct to the host cell in such a manner that the construct gains access to the interior of the host cell. The methods of the invention do not require a particular method for introducing a nucleotide construct to a host organism, only that the nucleotide construct gains access to the interior of at least one cell of the host organism. The host cell can be a eukaryotic or prokaryotic cell. In particular embodiments, the eukaryotic host cell is a plant cell, a mammalian cell, an avian cell, or an insect cell. In some embodiments, the eukaryotic cell that comprises or expresses a presently disclosed RGN or that has been modified by a presently disclosed RGN is a human cell. In some embodiments, the eukaryotic cell that comprises or expresses a presently disclosed RGN or that has been modified by a presently disclosed RGN is a cell of hematopoietic origin, such as an immune cell (i.e., a cell of the innate or adaptive immune system) including but not limited to a B cell, a T cell, a natural killer (NK) cell, a pluripotent stem cell, an induced pluripotent stem cell, a chimeric antigen receptor T (CAR-T) cell, a monocyte, a macrophage, and a dendritic cell. In some embodiments, the eukaryotic cell that comprises or expresses a presently disclosed RGN or that has been modified by a presently disclosed RGN is an ocular cell, muscle cell (e.g., skeletal muscle cell), epithelial cell (e.g., lung epithelial cell), diseased cell (e.g., tumor cell).

[0233] Methods for introducing nucleotide constructs into plants and other host cells are known in the art including, but not limited to, stable transformation methods, transient transformation methods, and virus-mediated methods.

[0234] The methods result in a transformed organism, such as a plant, including whole plants, as well as plant organs (e.g., leaves, stems, roots, etc.), seeds, plant cells, propagules, embryos and progeny of the same. Plant cells can be differentiated or undifferentiated (e.g., callus, suspension culture cells, protoplasts, leaf cells, root cells, phloem cells, pollen).

[0235] “Transgenic organisms” or “transformed organisms” or “stably transformed” organisms or cells or tissues refers to organisms that have incorporated or integrated a polynucleotide encoding an RGN, crRNA, and/or tracrRNA of the invention. It is recognized that other exogenous or endogenous nucleic acid sequences or DNA fragments may also be incorporated into the host cell. Agrobacterium- and biolistic-mediated transformation remain the two predominantly employed approaches for transformation of plant cells. However, transformation of a host cell may be performed by infection, transfection, microinjection, electroporation, microprojection, biolistics or particle bombardment, electroporation, silica/carbon fibers, ultrasound mediated, PEG mediated, calcium phosphate co-precipitation, polycation DMSO technique, DEAE dextran procedure, and viral mediated, liposome mediated and the like. Viral-mediated introduction of a polynucleotide encoding an RGN, crRNA, and/or tracrRNA includes retroviral, lentiviral, adenoviral, and adeno-associated viral mediated introduction and expression, as well as the use of Caulimoviruses, Geminiviruses, and RNA plant viruses.

[0236] Transformation protocols as well as protocols for introducing polypeptides or polynucleotide sequences into plants may vary depending on the type of host cell (e.g., monocot or dicot plant cell) targeted for transformation. Methods for transformation are known in the art and include those set forth in U.S. Pat. Nos. 8,575,425; 7,692,068; 8,802,934; 7,541,517; each of which is herein incorporated by reference. See, also, Rakoczy-Trojanowska, M. (2002) Cell Mol Biol Lett. 7:849-858; Jones et al. (2005) Plant Methods 1:5; Rivera et al. (2012) Physics of Life Reviews 9:308-345; Bartlett et al. (2008) Plant Methods 4:1-12; Bates, G. W. (1999) Methods in Molecular Biology 111:359-366; Binns and Thomashow (1988) Annual Reviews in Microbiology 42:575-606; Christou, P. (1992) The Plant Journal 2:275-281; Christou, P. (1995) Euphytica 85:13-27; Tzfira et al. (2004) TRENDS in Genetics 20:375-383; Yao et al. (2006) Journal of Experimental Botany 57:3737-3746; Zupan and Zambryski (1995) Plant Physiology 107:1041-1047; Jones et al. (2005) Plant Methods 1:5;

[0237] Transformation may result in stable or transient incorporation of the nucleic acid into the cell. “Stable transformation” is intended to mean that the nucleotide construct introduced into a host cell integrates into the genome of the host cell and is capable of being inherited by the progeny thereof. “Transient transformation” is intended to mean that a polynucleotide is introduced into the host cell and does not integrate into the genome of the host cell.

[0238] Methods for transformation of chloroplasts are known in the art. See, for example, Svab et al. (1990) Proc. Nail. Acad. Sci. USA 87:8526-8530; Svab and Maliga (1993) Proc. Natl. Acad. Sci. USA 90:913-917; Svab and Maliga (1993) EMBO J. 12:601-606. The method relies on particle gun delivery of DNA containing a selectable marker and targeting of the DNA to the plastid genome through homologous recombination. Additionally, plastid transformation can be accomplished by transactivation of a silent plastid-borne transgene by tissue-preferred expression of a nuclear-encoded and plastid-directed RNA polymerase. Such a system has been reported in McBride et al. (1994) Proc. Natl. Acad. Sci. USA 91:7301-7305.

[0239] The cells that have been transformed may be grown into a transgenic organism, such as a plant, in accordance with conventional ways. See, for example, McCormick et al. (1986) Plant Cell Reports 5:81-84. These plants may then be grown, and either pollinated with the same transformed strain or different strains, and the resulting hybrid having constitutive expression of the desired phenotypic characteristic identified. Two or more generations may be grown to ensure that expression of the desired phenotypic characteristic is stably maintained and inherited and then seeds harvested to ensure expression of the desired phenotypic characteristic has been achieved. In this manner, the present invention provides transformed seed (also referred to as “transgenic seed”) having a nucleotide construct of the invention, for example, an expression cassette of the invention, stably incorporated into their genome.

[0240] Alternatively, cells that have been transformed may be introduced into an organism. These cells could have originated from the organism, wherein the cells are transformed in an ex vivo approach.

[0241] The sequences provided herein may be used for transformation of any plant species, including, but not limited to, monocots and dicots. Examples of plants of interest include, but are not limited to, corn (maize), sorghum, wheat, sunflower, tomato, crucifers, peppers, potato, cotton, rice, soybean, sugarbeet, sugarcane, tobacco, barley, and oilseed rape, Brassica sp., alfalfa, rye, millet, safflower, peanuts, sweet potato, cassava, coffee, coconut, pineapple, citrus trees, cocoa, tea, banana, avocado, fig, guava, mango, olive, papaya, cashew, macadamia, almond, oats, vegetables, ornamentals, and conifers.

[0242] Vegetables include, but are not limited to, tomatoes, lettuce, green beans, lima beans, peas, and members of the genus Curcumas such as cucumber, cantaloupe, and musk melon. Ornamentals include, but are not limited to, azalea, hydrangea, hibiscus, roses, tulips, daffodils, petunias, carnation, poinsettia, and chrysanthemum. In specific embodiments, plants of the present invention are crop plants (for example, maize, sorghum, wheat, sunflower, tomato, crucifers, peppers, potato, cotton, rice, soybean, sugarbeet, sugarcane, tobacco, barley, oilseed rape, etc.).

[0243] As used herein, the term plant includes plant cells, plant protoplasts, plant cell tissue cultures from which plants can be regenerated, plant calli, plant clumps, and plant cells that are intact in plants or parts of plants such as embryos, pollen, ovules, seeds, leaves, flowers, branches, fruit, kernels, ears, cobs, husks, stalks, roots, root tips, anthers, and the like. Grain is intended to mean the mature seed produced by commercial growers for purposes other than growing or reproducing the species. Progeny, variants, and mutants of the regenerated plants are also included within the scope of the invention, provided that these parts comprise the introduced polynucleotides. Further provided is a processed plant product or byproduct that retains the sequences disclosed herein, including for example, soymeal.

[0244] The polynucleotides encoding the RGNs, crRNAs, and/or tracrRNAs or comprising the crRNAs and/or tracrRNAs can also be used to transform any prokaryotic species, including but not limited to, archaea and bacteria (e.g., Bacillus sp., Klebsiella sp. Streptomyces sp., Rhizobium sp., Escherichia sp., Pseudomonas sp., Salmonella sp., Shigella sp., Vibrio sp., Yersinia sp., Mycoplasma sp., Agrobacterium, Lactobacillus sp.).

[0245] The polynucleotides encoding the RGNs, crRNAs, and/or tracrRNAs or comprising the crRNAs and/or tracrRNAs can be used to transform any eukaryotic species, including but not limited to animals (e.g., mammals, insects, fish, birds, and reptiles), fungi, amoeba, algae, and yeast.

[0246] Conventional viral and non-viral based gene transfer methods can be used to introduce nucleic acids in mammalian, insect, or avian cells or target tissues. Such methods can be used to administer nucleic acids encoding components of an RGN system to cells in culture, or in a host organism. Non-viral vector delivery systems include DNA plasmids, RNA (e.g. a transcript of a vector described herein), naked nucleic acid, and nucleic acid complexed with a delivery vehicle, such as a liposome. Viral vector delivery systems include DNA and RNA viruses, which have either episomal or integrated genomes after delivery to the cell. For a review of gene therapy procedures, see Anderson, Science 256: 808-813 (1992); Nabel & Feigner, TIBTECH 11:211-217 (1993); Mitani & Caskey, TIBTECH 11:162-166 (1993); Dillon, TIBTECH 11:167-175 (1993); Miller, Nature 357:455-460 (1992); Van Brunt, Biotechnology 6(10): 1149-1154 (1988); Vigne, Restorative Neurology and Neuroscience 8:35-36 (1995); Kremer & Perricaudet, British Medical Bulletin 51(1):31-44 (1995); Haddada et al., in Current Topics in Microbiology and Immunology, Doerfler and Bohm (eds) (1995); and Yu et al., Gene Therapy 1:13-26 (1994).

[0247] Methods of non-viral delivery of nucleic acids include lipofection, nucleofection, microinjection, biolistics, virosomes, liposomes, immunoliposomes, polycation or lipid: nucleic acid conjugates, naked DNA, artificial virions, and agent-enhanced uptake of DNA. Lipofection is described in e.g., U.S. Pat. Nos. 5,049,386, 4,946,787; and 4,897,355) and lipofection reagents are sold commercially (e.g., Transfectam™ and Lipofectin™). Cationic and neutral lipids that are suitable for efficient receptor-recognition lipofection of polynucleotides include those of Feigner, WO 91/17424; WO 91/16024. Delivery can be to cells (e.g. in vitro or ex vivo administration) or target tissues (e.g. in vivo administration). The preparation of lipid:nucleic acid complexes, including targeted liposomes such as immunolipid complexes, is well known to one of skill in the art (see, e.g., Crystal, Science 270:404-410 (1995); Blaese et al., Cancer Gene Ther. 2:291-297 (1995); Behr et al., Bioconjugate Chem. 5:382-389 (1994); Remy et al., Bioconjugate Chem. 5:647-654 (1994); Gao et al., Gene Therapy 2:710-722 (1995); Ahmad et al., Cancer Res. 52:4817-4820 (1992); U.S. Pat. Nos. 4,186,183, 4,217,344, 4,235,871, 4,261,975, 4,485,054, 4,501,728, 4,774,085, 4,837,028, and 4,946,787).

[0248] The use of RNA or DNA viral based systems for the delivery of nucleic acids takes advantage of highly evolved processes for targeting a virus to specific cells in the body and trafficking the viral payload to the nucleus. Viral vectors can be administered directly to patients (in vivo) or they can be used to treat cells in vitro, and the modified cells may optionally be administered to patients (ex vivo). Conventional viral based systems could include retroviral, lentivirus, adenoviral, adeno-associated and herpes simplex virus vectors for gene transfer. Integration in the host genome is possible with the retrovirus, lentivirus, and adeno-associated virus gene transfer methods, often resulting in long term expression of the inserted transgene. Additionally, high transduction efficiencies have been observed in many different cell types and target tissues.

[0249] The tropism of a retrovirus can be altered by incorporating foreign envelope proteins, expanding the potential target population of target cells. Lentiviral vectors are retroviral vectors that are able to transduce or infect non-dividing cells and typically produce high viral titers. Selection of a retroviral gene transfer system would therefore depend on the target tissue. Retroviral vectors are comprised of cis-acting long terminal repeats with packaging capacity for up to 6-10 kb of foreign sequence. The minimum cis-acting LTRs are sufficient for replication and packaging of the vectors, which are then used to integrate the therapeutic gene into the target cell to provide permanent transgene expression. Widely used retroviral vectors include those based upon murine leukemia virus (MuLV), gibbon ape leukemia virus (GaLV), Simian Immuno deficiency virus (SIV), human immuno deficiency virus (HIV), and combinations thereof (see, e.g., Buchscher et al., J. Viral. 66:2731-2739 (1992); Johann et al., J. Viral. 66:1635-1640 (1992); Sommnerfelt et al., J. Viral. 176:58-59 (1990); Wilson et al., J. Viral. 63:2374-2378 (1989); Miller et al., J. Viral. 65:2220-2224 (1991); PCT/US94/05700).

[0250] In applications where transient expression is preferred, adenoviral based systems may be used. Adenoviral based vectors are capable of very high transduction efficiency in many cell types and do not require cell division. With such vectors, high titer and levels of expression have been obtained. This vector can be produced in large quantities in a relatively simple system. Adeno-associated virus (“AAV”) vectors may also be used to transduce cells with target nucleic acids, e.g., in the in vitro production of nucleic acids and peptides, and for in vivo and ex vivo gene therapy procedures (see, e.g., West et al., Virology 160:38-47 (1987); U.S. Pat. No. 4,797,368; WO 93/24641; Katin, Human Gene Therapy 5:793-801 (1994); Muzyczka, J. Clin. Invest. 94:1351 (1994). Construction of recombinant AAV vectors is described in a number of publications, including U.S. Pat. No. 5,173,414; Tratschin et al., Mol. Cell. Biol. 5:3251-3260 (1985); Tratschin, et al., Mol. Cell. Biol. 4:2072-2081 (1984); Hermonat & Muzyczka, PNAS 81:6466-6470 (1984); and Samulski et al., 1. Viral. 63:03822-3828 (1989). Packaging cells are typically used to form virus particles that are capable of infecting a host cell. Such cells include 293 cells, which package adenovirus, and ψJ2 cells or PA317 cells, which package retrovirus.

[0251] Viral vectors used in gene therapy are usually generated by producing a cell line that packages a nucleic acid vector into a viral particle. The vectors typically contain the minimal viral sequences required for packaging and subsequent integration into a host, other viral sequences being replaced by an expression cassette for the polynucleotide(s) to be expressed. The missing viral functions are typically supplied in trans by the packaging cell line. For example, AAV vectors used in gene therapy typically only possess ITR sequences from the AAV genome which are required for packaging and integration into the host genome. Viral DNA is packaged in a cell line, which contains a helper plasmid encoding the other AAV genes, namely rep and cap, but lacking ITR sequences.

[0252] The cell line may also be infected with adenovirus as a helper. The helper virus promotes replication of the AAV vector and expression of AAV genes from the helper plasmid. The helper plasmid is not packaged in significant amounts due to a lack of ITR sequences. Contamination with adenovirus can be reduced by, e.g., heat treatment to which adenovirus is more sensitive than AAV. Additional methods for the delivery of nucleic acids to cells are known to those skilled in the art. See, for example, US20030087817, incorporated herein by reference.

[0253] In some embodiments, a host cell is transiently or non-transiently transfected with one or more vectors described herein. In some embodiments, a cell is transfected as it naturally occurs in a subject. In some embodiments, a cell that is transfected is taken from a subject. In some embodiments, the cell is derived from cells taken from a subject, such as a cell line. In some embodiments, the cell line may be mammalian, insect, or avian cells. A wide variety of cell lines for tissue culture are known in the art. Examples of cell lines include, but are not limited to, C8161, CCRF-CEM, MOLT, mIMCD-3, NHDF, HeLaS3, Huh1, Huh4, Huh7, HUVEC, HASMC, HEKn, HEKa, MiaPaCell, Panel, PC-3, TF1, CTLL-2, CIR, Rat6, CVI, RPTE, AlO, T24, 182, A375, ARH-77, Calu1, SW480, SW620, SKOV3, SK-UT, CaCo2, P388D1, SEM-K2, WEHI-231, HB56, TIB55, lurkat, 145.01, LRMB, Bcl-1, BC-3, IC21, DLD2, Raw264.7, NRK, NRK-52E, MRC5, MEF, Hep G2, HeLa B, HeLa T4. COS, COS-1, COS-6, COS-M6A, BS-C-1 monkey kidney epithelial, BALB/3T3 mouse embryo fibroblast, 3T3 Swiss, 3T3-L1, 132-d5 human fetal fibroblasts; 10.1 mouse fibroblasts, 293-T, 3T3, 721, 9L, A2780, A2780ADR, A2780cis, A172, A20, A253, A431, A-549, ALC, B16, B35, BCP-I cells, BEAS-2B, bEnd.3, BHK-21, BR 293, BxPC3, C3H-10T1/2, C6/36, Cal-27, CHO, CHO-7, CHO-IR, CHO-K1, CHO-K2, CHO-T, CHO Dhfr−/−, COR-L23, COR-L23/CPR, COR-L235010, CORL23/R23, COS-7, COV-434, CML T1, CMT, CT26, D17, DH82, DU145, DuCaP, EL4, EM2, EM3, EMT6/AR1, EMT6/AR10.0, FM3, H1299, H69, HB54, HB55, HCA2, HEK-293, HeLa, Hepalclc7, HL-60, HMEC, HT-29, lurkat, lY cells, K562 cells, Ku812, KCL22, KG1, KYO1, LNCap, Ma-Mel 1-48, MC-38, MCF-7, MCF-10A, MDA-MB-231, MDA-MB-468, MDA-MB-435, MDCKII, MDCKII, MOR/0.2R, MONO-MAC 6, MTD-1A, MyEnd, NCI-H69/CPR, NCI-H69/LX10, NCI-H69/LX20, NCI-H69/LX4, NIH-3T3, NALM-1, NW-145, OPCN/OPCT cell lines, Peer, PNT-1A/PNT 2, RenCa, RIN-5F, RMA/RMAS, Saos-2 cells, Sf-9, SkBr3, T2, T-47D, T84, THP1 cell line, U373, U87, U937, VCaP, Vero cells, WM39, WT-49, X63, YAC-1, YAR, and transgenic varieties thereof. Cell lines are available from a variety of sources known to those with skill in the art (see, e.g., the American Type Culture Collection (ATCC) (Manassas, Va.)).

[0254] In some embodiments, a cell transfected with one or more vectors described herein is used to establish a new cell line comprising one or more vector-derived sequences. In some embodiments, a cell transiently transfected with the components of an RGN system as described herein (such as by transient transfection of one or more vectors, or transfection with RNA), and modified through the activity of an RGN system, is used to establish a new cell line comprising cells containing the modification but lacking any other exogenous sequence. In some embodiments, cells transiently or non-transiently transfected with one or more vectors described herein, or cell lines derived from such cells are used in assessing one or more test compounds.

[0255] In some embodiments, one or more vectors described herein are used to produce a non-human transgenic animal or transgenic plant. In some embodiments, the transgenic animal is a mammal, such as a mouse, rat, hamster, rabbit, cow, or pig. In some embodiments, the transgenic animal is a bird, such as a chicken or a duck. In some embodiments, the transgenic animal is an insect, such as a mosquito or a tick.

### V. Variants and Fragments of Polypeptides and Polynucleotides

[0256] The present disclosure provides active variants and fragments of a naturally-occurring (i.e., wild-type) RNA-guided nuclease, the amino acid sequence of which is set forth as any one of SEQ ID NOs: 1-20, as well as active variants and fragments of naturally-occurring CRISPR repeats, such as any one of the sequences set forth as SEQ ID NOs: 21-41, or nucleotides 1-17 of SEQ ID NO: 1041 or 1042, or nucleotides 1-22 of SEQ ID NO: 1044 or 1045, and active variant and fragments of naturally-occurring tracrRNAs, such as any one of the sequences set forth as SEQ ID NOs: 42-62, nucleotides 19-111 of SEQ ID NO: 1040, nucleotides 22-85 of SEQ ID NO: 1041 or 1042, nucleotides 24-138 of SEQ ID NO: 143, nucleotides 27-96 of SEQ ID NO: 1044, or nucleotides 27-95 of SEQ ID NO: 1045 and polynucleotides encoding the same.

[0257] While the activity of a variant or fragment may be altered compared to the polynucleotide or polypeptide of interest, the variant and fragment should retain the functionality of the polynucleotide or polypeptide of interest. For example, a variant or fragment may have increased activity, decreased activity, different spectrum of activity or any other alteration in activity when compared to the polynucleotide or polypeptide of interest.

[0258] Fragments and variants of naturally-occurring RGN polypeptides, such as those disclosed herein, will retain sequence-specific, RNA-guided DNA-binding activity. In particular embodiments, fragments and variants of naturally-occurring RGN polypeptides, such as those disclosed herein, will retain nuclease activity (single-stranded or double-stranded).

[0259] Fragments and variants of naturally-occurring CRISPR repeats, such as those disclosed herein, will retain the ability, when part of a guide RNA (comprising a tracrRNA), to bind to and guide an RNA-guided nuclease (complexed with the guide RNA) to a target sequence (e.g., target DNA sequence) in a sequence-specific manner.

[0260] Fragments and variants of naturally-occurring tracrRNAs, such as those disclosed herein, will retain the ability, when part of a guide RNA (comprising a CRISPR RNA), to guide an RNA-guided nuclease (complexed with the guide RNA) to a target sequence (e.g., target DNA sequence) in a sequence-specific manner.

[0261] The term “fragment” refers to a portion of a polynucleotide or polypeptide sequence of the invention. “Fragments” or “biologically active portions” include polynucleotides comprising a sufficient number of contiguous nucleotides to retain the biological activity (i.e., binding to and directing an RGN in a sequence-specific manner to a target nucleotide sequence when comprised within a guide RNA). “Fragments” or “biologically active portions” include polypeptides comprising a sufficient number of contiguous amino acid residues to retain the biological activity (i.e., binding to a target sequence in a sequence-specific manner when complexed with a guide RNA). Fragments of the RGN proteins include those that are shorter than the full-length sequences due to the use of an alternate downstream start site. A biologically active portion of an RGN protein can be a polypeptide that comprises, for example, 10, 25, 50, 100, 150, 200, 250, 300, 350, 400, 450, 500, 550, 600, 650, 700, 750, 800, 850, 900, 950, 1000, 1050, 1100, 1150, 1200, 1250, 1300, 1350, or more contiguous amino acid residues of any one of SEQ ID NOs: 1-20. Such biologically active portions can be prepared by recombinant techniques and evaluated for sequence-specific, RNA-guided DNA-binding activity. A biologically active fragment of a CRISPR repeat sequence can comprise at least 8 contiguous amino acids of any one of SEQ ID NOs:21-41, or nucleotides 1-14 of SEQ ID NO: 1040, nucleotides 1-17 of SEQ ID NO: 1041 or 1042, nucleotides 1-19 of SEQ ID NO: 1043, or nucleotides 1-22 of SEQ ID NO: 1044 or 1045. A biologically active portion of a CRISPR repeat sequence can be a polynucleotide that comprises, for example, 8, 9, 10, 11, 12, 13, 14, 15, 16, 17, 18, 19, 20, or 21 contiguous nucleotides of any one of SEQ ID NOs: 21-41, or nucleotides 1-17 of SEQ ID NO: 1041 or 1042, or nucleotides 1-22 of SEQ ID NO: 1044 or 1045. A biologically active portion of a tracrRNA can be a polynucleotide that comprises, for example, 8, 9, 10, 11, 12, 13, 14, 15, 16, 17, 18, 19, 20, 21, 22, 23, 24, 25, 26, 27, 28, 29, 30, 35, 40, 45, 50, 55, 60, 65, 70, 75, 80, 85, 90, 95, 100 or more contiguous nucleotides of any one of SEQ ID NOs:42-62, nucleotides 19-111 of SEQ ID NO: 1040, nucleotides 22-85 of SEQ ID NO: 1041 or 1042, nucleotides 24-138 of SEQ ID NO: 143, nucleotides 27-96 of SEQ ID NO: 1044, or nucleotides 27-95 of SEQ ID NO: 1045.

[0262] In general, “variants” is intended to mean substantially similar sequences. For polynucleotides, a variant comprises a deletion and/or addition of one or more nucleotides at one or more internal sites within the native polynucleotide and/or a substitution of one or more nucleotides at one or more sites in the native polynucleotide. As used herein, a “native” or “wild type” polynucleotide or polypeptide comprises a naturally occurring nucleotide sequence or amino acid sequence, respectively. For polynucleotides, conservative variants include those sequences that, because of the degeneracy of the genetic code, encode the native amino acid sequence of the gene of interest. Naturally occurring allelic variants such as these can be identified with the use of well-known molecular biology techniques, as, for example, with polymerase chain reaction (PCR) and hybridization techniques as outlined below. Variant polynucleotides also include synthetically derived polynucleotides, such as those generated, for example, by using site-directed mutagenesis but which still encode the polypeptide or the polynucleotide of interest. Generally, variants of a particular polynucleotide disclosed herein will have at least about 40%, 45%, 50%, 55%, 60%, 65%, 70%, 75%, 80%, 85%, 90%, 91%, 92%, 93%, 94%, 95%, 96%, 97%, 98%, 99% or more sequence identity to that particular polynucleotide as determined by sequence alignment programs and parameters described elsewhere herein.

[0263] Variants of a particular polynucleotide disclosed herein (i.e., the reference polynucleotide) can also be evaluated by comparison of the percent sequence identity between the polypeptide encoded by a variant polynucleotide and the polypeptide encoded by the reference polynucleotide. Percent sequence identity between any two polypeptides can be calculated using sequence alignment programs and parameters described elsewhere herein. Where any given pair of polynucleotides disclosed herein is evaluated by comparison of the percent sequence identity shared by the two polypeptides they encode, the percent sequence identity between the two encoded polypeptides is at least about 40%, 45%, 50%, 55%, 60%, 65%, 70%, 75%, 80%, 85%, 90%, 91%, 92%, 93%, 94%, 95%, 96%, 97%, 98%, 99% or more sequence identity.

[0264] In particular embodiments, the presently disclosed polynucleotides encode an RNA-guided nuclease polypeptide comprising an amino acid sequence having at least 40%, 45%, 50%, 55%, 60%, 65%, 70%, 75%, 80%, 81%, 82%, 83%, 84%, 85%, 86%, 87%, 88%, 89%, 90%, 91%, 92%, 93%, 94%, 95%, 96%, 97%, 98%, 99%, or greater identity to any one of the amino acid sequences set forth as SEQ ID NOs: 1-20.

[0265] A biologically active variant of an RGN polypeptide of the invention may differ by as few as about 1-15 amino acid residues, as few as about 1-10, such as about 6-10, as few as 5, as few as 4, as few as 3, as few as 2, or as few as 1 amino acid residue. In specific embodiments, the polypeptides can comprise an N-terminal or a C-terminal truncation, which can comprise at least a deletion of 10, 15, 20, 25, 30, 35, 40, 45, 50, 55, 60, 65, 70, 75, 80, 85, 90, 95, 100, 150, 200, 250, 300, 350, 400, 450, 500, 550, 600, 650, 700, 750, 800, 850, 900, 950, 1000, 1050, 1100, 1150, 1200, 1250, 1300, 1350 amino acids or more from either the N or C terminus of the polypeptide.

[0266] In certain embodiments, the presently disclosed polynucleotides comprise or encode a CRISPR repeat comprising a nucleotide sequence having at least 40%, 45%, 50%, 55%, 60%, 65%, 70%, 75%, 80%, 81%, 82%, 83%, 84%, 85%, 86%, 87%, 88%, 89%, 90%, 91%, 92%, 93%, 94%, 95%, 96%, 97%, 98%, 99%, or greater identity to any one of the nucleotide sequences set forth as SEQ ID NOs: 21-41, or nucleotides 1-17 of SEQ ID NO: 1041 or 1042, or nucleotides 1-22 of SEQ ID NO: 1044 or 1045.

[0267] The presently disclosed polynucleotides can comprise or encode a tracrRNA comprising a nucleotide sequence having at least 40%, 45%, 50%, 55%, 60%, 65%, 70%, 75%, 80%, 81%, 82%, 83%, 84%, 85%, 86%, 87%, 88%, 89%, 90%, 91%, 92%, 93%, 94%, 95%, 96%, 97%, 98%, 99%, or greater identity to any one of the nucleotide sequences set forth as SEQ ID NOs: 42-62, nucleotides 19-111 of SEQ ID NO: 1040, nucleotides 22-85 of SEQ ID NO: 1041 or 1042, nucleotides 24-138 of SEQ ID NO: 143, nucleotides 27-96 of SEQ ID NO: 1044, or nucleotides 27-95 of SEQ ID NO: 1045.

[0268] Biologically active variants of a CRISPR repeat or tracrRNA of the invention may differ by as few as about 1-15 nucleotides, as few as about 1-10, such as about 6-10, as few as 5, as few as 4, as few as 3, as few as 2, or as few as 1 nucleotide. In specific embodiments, the polynucleotides can comprise a 5′ or 3′ truncation, which can comprise at least a deletion of 10, 15, 20, 25, 30, 35, 40, 45, 50, 55, 60, 65, 70, 75, 80, 90, 95, 100, 105, 110 nucleotides or more from either the 5′ or 3′ end of the polynucleotide.

[0269] It is recognized that modifications may be made to the RGN polypeptides, CRISPR repeats, and tracrRNAs provided herein creating variant proteins and polynucleotides. Changes designed by man may be introduced through the application of site-directed mutagenesis techniques. Alternatively, native, as yet unknown or as yet unidentified polynucleotides and/or polypeptides structurally and/or functionally related to the sequences disclosed herein may also be identified that fall within the scope of the present invention. Conservative amino acid substitutions may be made in nonconserved regions that do not alter the function of the RGN proteins. Alternatively, modifications may be made that improve the activity of the RGN.

[0270] Variant polynucleotides and proteins also encompass sequences and proteins derived from a mutagenic and recombinogenic procedure such as DNA shuffling. With such a procedure, one or more different RGN proteins disclosed herein (e.g., SEQ ID NOs: 1-20) is manipulated to create a new RGN protein possessing the desired properties. In this manner, libraries of recombinant polynucleotides are generated from a population of related sequence polynucleotides comprising sequence regions that have substantial sequence identity and can be homologously recombined in vitro or in vivo. For example, using this approach, sequence motifs encoding a domain of interest may be shuffled between the RGN sequences provided herein and other known RGN genes to obtain a new gene coding for a protein with an improved property of interest, such as an increased Kₘ in the case of an enzyme. Strategies for such DNA shuffling are known in the art. See, for example, Stemmer (1994) Proc. Natl. Acad. Sci. USA 91:10747-10751; Stemmer (1994) Nature 370:389-391; Crameri et al. (1997) Nature Biotech. 15:436-438; Moore et al. (1997) J. Mol. Biol. 272:336-347; Zhang et al. (1997) Proc. Natl. Acad. Sci. USA 94:4504-4509; Crameri et al. (1998) Nature 391:288-291; and U.S. Pat. Nos. 5,605,793 and 5,837,458. A “shuffled” nucleic acid is a nucleic acid produced by a shuffling procedure such as any shuffling procedure set forth herein. Shuffled nucleic acids are produced by recombining (physically or virtually) two or more nucleic acids (or character strings), for example in an artificial, and optionally recursive, fashion. Generally, one or more screening steps are used in shuffling processes to identify nucleic acids of interest; this screening step can be performed before or after any recombination step. In some (but not all) shuffling embodiments, it is desirable to perform multiple rounds of recombination prior to selection to increase the diversity of the pool to be screened. The overall process of recombination and selection are optionally repeated recursively. Depending on context, shuffling can refer to an overall process of recombination and selection, or, alternately, can simply refer to the recombinational portions of the overall process.

[0271] As used herein, “sequence identity” or “identity” in the context of two polynucleotides or polypeptide sequences makes reference to the residues in the two sequences that are the same when aligned for maximum correspondence over a specified comparison window. When percentage of sequence identity is used in reference to proteins it is recognized that residue positions which are not identical often differ by conservative amino acid substitutions, where amino acid residues are substituted for other amino acid residues with similar chemical properties (e.g., charge or hydrophobicity) and therefore do not change the functional properties of the molecule. When sequences differ in conservative substitutions, the percent sequence identity may be adjusted upwards to correct for the conservative nature of the substitution. Sequences that differ by such conservative substitutions are said to have “sequence similarity” or “similarity”. Means for making this adjustment are well known to those of skill in the art. Typically, this involves scoring a conservative substitution as a partial rather than a full mismatch, thereby increasing the percentage sequence identity. Thus, for example, where an identical amino acid is given a score of 1 and a non-conservative substitution is given a score of zero, a conservative substitution is given a score between zero and 1. The scoring of conservative substitutions is calculated, e.g., as implemented in the program PC/GENE (Intelligenetics, Mountain View, California).

[0272] As used herein, “percentage of sequence identity” means the value determined by comparing two optimally aligned sequences over a comparison window, wherein the portion of the polynucleotide sequence in the comparison window may comprise additions or deletions (i.e., gaps) as compared to the reference sequence (which does not comprise additions or deletions) for optimal alignment of the two sequences. The percentage is calculated by determining the number of positions at which the identical nucleic acid base or amino acid residue occurs in both sequences to yield the number of matched positions, dividing the number of matched positions by the total number of positions in the window of comparison, and multiplying the result by 100 to yield the percentage of sequence identity.

[0273] Unless otherwise stated, sequence identity/similarity values provided herein refer to the value obtained using GAP Version 10 using the following parameters: % identity and % similarity for a nucleotide sequence using GAP Weight of 50 and Length Weight of 3, and the nwsgapdna.cmp scoring matrix; % identity and % similarity for an amino acid sequence using GAP Weight of 8 and Length Weight of 2, and the BLOSUM62 scoring matrix; or any equivalent program thereof. By “equivalent program” is intended any sequence comparison program that, for any two sequences in question, generates an alignment having identical nucleotide or amino acid residue matches and an identical percent sequence identity when compared to the corresponding alignment generated by GAP Version 10.

[0274] Two sequences are “optimally aligned” when they are aligned for similarity scoring using a defined amino acid substitution matrix (e.g., BLOSUM62), gap existence penalty and gap extension penalty so as to arrive at the highest score possible for that pair of sequences. Amino acid substitution matrices and their use in quantifying the similarity between two sequences are well-known in the art and described, e.g., in Dayhoff et al. (1978) “A model of evolutionary change in proteins.” In “Atlas of Protein Sequence and Structure,” Vol. 5, Suppl. 3 (ed. M. O. Dayhoff), pp. 345-352. Natl. Biomed. Res. Found., Washington, D.C. and Henikoff et al. (1992) Proc. Natl. Acad. Sci. USA 89:10915-10919. The BLOSUM62 matrix is often used as a default scoring substitution matrix in sequence alignment protocols. The gap existence penalty is imposed for the introduction of a single amino acid gap in one of the aligned sequences, and the gap extension penalty is imposed for each additional empty amino acid position inserted into an already opened gap. The alignment is defined by the amino acid positions of each sequence at which the alignment begins and ends, and optionally by the insertion of a gap or multiple gaps in one or both sequences, so as to arrive at the highest possible score. While optimal alignment and scoring can be accomplished manually, the process is facilitated by the use of a computer-implemented alignment algorithm, e.g., gapped BLAST 2.0, described in Altschul et al. (1997) Nucleic Acids Res. 25:3389-3402, and made available to the public at the National Center for Biotechnology Information Website (www.ncbi.nlm.nih.gov). Optimal alignments, including multiple alignments, can be prepared using, e.g., PSI-BLAST, available through www.ncbi.nlm.nih.gov and described by Altschul et al. (1997) Nucleic Acids Res. 25:3389-3402.

[0275] With respect to an amino acid sequence that is optimally aligned with a reference sequence, an amino acid residue “corresponds to” the position in the reference sequence with which the residue is paired in the alignment. The “position” is denoted by a number that sequentially identifies each amino acid in the reference sequence based on its position relative to the N-terminus. Owing to deletions, insertion, truncations, fusions, etc., that must be taken into account when determining an optimal alignment, in general the amino acid residue number in a test sequence as determined by simply counting from the N-terminal will not necessarily be the same as the number of its corresponding position in the reference sequence. For example, in a case where there is a deletion in an aligned test sequence, there will be no amino acid that corresponds to a position in the reference sequence at the site of deletion. Where there is an insertion in an aligned reference sequence, that insertion will not correspond to any amino acid position in the reference sequence. In the case of truncations or fusions there can be stretches of amino acids in either the reference or aligned sequence that do not correspond to any amino acid in the corresponding sequence.

### VI. Antibodies

[0276] Antibodies to the RGN polypeptides or ribonucleoproteins comprising the RGN polypeptides of the present invention, including those having any one of the amino acid sequences set forth as SEQ ID NOs: 1-20 or active variants or fragments thereof, are also encompassed. Methods for producing antibodies are well known in the art (see, for example, Harlow and Lane (1988) Antibodies: A Laboratory Manual, Cold Spring Harbor Laboratory, Cold Spring Harbor, N.Y.; and U.S. Pat. No. 4,196,265). These antibodies can be used in kits for the detection and isolation of RGN polypeptides or ribonucleoproteins. Thus, this disclosure provides kits comprising antibodies that specifically bind to the polypeptides or ribonucleoproteins described herein, including, for example, polypeptides having any one of the amino acid sequences set forth as SEQ ID NOs: 1-20.

### VII. RGN Systems and Ribonucleoprotein Complexes for Binding a Target Sequence of Interest and Methods of Making the Same

[0277] The present disclosure provides a system for binding a target sequence (e.g., target DNA sequence) of interest, wherein the system comprises at least one RNA-guided nuclease or a nucleotide sequence encoding the same and one or more guide RNAs capable of forming a complex with the RGN polypeptide (ribonucleoprotein complex). The guide RNA hybridizes to the non-target strand of a target sequence of interest and also forms a complex with the RGN polypeptide, thereby directing the RGN polypeptide to bind to the target DNA sequence. In some of these embodiments, the RGN comprises any one of the amino acid sequences set forth as SEQ ID NOs: 1-20, or an active variant or fragment thereof. In various embodiments, the guide RNA comprises a CRISPR repeat having any one of the nucleotide sequences set forth as SEQ ID NOs:21-41, or nucleotides 1-14 of SEQ ID NO: 1040, nucleotides 1-17 of SEQ ID NO: 1041 or 1042, nucleotides 1-19 of SEQ ID NO: 1043, or nucleotides 1-22 of SEQ ID NO: 1044 or 1045, or an active variant or fragment thereof. In particular embodiments, the guide RNA comprises a tracrRNA having any one of the nucleotide sequences set forth as SEQ ID NOs: 42-62, nucleotides 19-111 of SEQ ID NO: 1040, nucleotides 22-85 of SEQ ID NO: 1041 or 1042, nucleotides 24-138 of SEQ ID NO: 143, nucleotides 27-96 of SEQ ID NO: 1044, or nucleotides 27-95 of SEQ ID NO: 1045, or an active variant or fragment thereof. The guide RNA of the system can be a single guide RNA or a dual-guide RNA. In particular embodiments, the system comprises an RNA-guided nuclease that is heterologous to the guide RNA, wherein the RGN and guide RNA are not found complexed to one another (i.e., bound to one another) in nature.

[0278] The system for binding a target sequence of interest provided herein can be a ribonucleoprotein complex, which is at least one molecule of an RNA bound to at least one protein. The ribonucleoprotein complexes provided herein comprise at least one guide RNA as the RNA component and an RNA-guided nuclease as the protein component. Such ribonucleoprotein complexes can be purified from a cell or organism that naturally expresses an RGN polypeptide and has been engineered to express a particular guide RNA that is specific for a target sequence of interest. Alternatively, the ribonucleoprotein complex can be purified from a cell or organism that has been transformed with polynucleotides that encode an RGN polypeptide and a guide RNA (or a polynucleotide that comprises a guide RNA) and cultured under conditions to allow for the expression of the RGN polypeptide and guide RNA. Thus, methods are provided for making an RGN polypeptide or an RGN ribonucleoprotein complex. Such methods comprise culturing a cell comprising a nucleotide sequence encoding an RGN polypeptide, and in some embodiments a nucleotide sequence encoding or comprising a guide RNA, under conditions in which the RGN polypeptide (and in some embodiments, the guide RNA) is expressed. The RGN polypeptide or RGN ribonucleoprotein can then be purified from a lysate of the cultured cells. In embodiments, the nucleotide sequence encoding an RGN polypeptide includes a mRNA (messenger RNA). In some embodiments, methods for assembling an RNP complex comprise combining one or more of the presently disclosed guide RNAs and one or more of the presently disclosed RGN polypeptides under conditions suitable for formation of the RNP complex.

[0279] Methods for purifying an RGN polypeptide or RGN ribonucleoprotein complex from a lysate of a biological sample are known in the art (e.g., size exclusion and/or affinity chromatography, 2D-PAGE, HPLC, reversed-phase chromatography, immunoprecipitation). In particular methods, the RGN polypeptide is recombinantly produced and comprises a purification tag to aid in its purification, including but not limited to, glutathione-S-transferase (GST), chitin binding protein (CBP), maltose binding protein, thioredoxin (TRX), poly(NANP), tandem affinity purification (TAP) tag, myc, AcV5, AU1, AU5, E, ECS, E2, FLAG (e.g., 3×FLAG tag), HA, nus, Softag 1, Softag 3, Strep, SBP, Glu-Glu, HSV, KT3, S, S1, T7, V5, VSV-G, 6×His, 10×His, biotin carboxyl carrier protein (BCCP), and calmodulin. Generally, the tagged RGN polypeptide or RGN ribonucleoprotein complex is purified using immobilized metal affinity chromatography. It will be appreciated that other similar methods known in the art may be used, including other forms of chromatography or for example immunoprecipitation, either alone or in combination.

[0280] An “isolated” or “purified” polypeptide, or biologically active portion thereof, is substantially or essentially free from components that normally accompany or interact with the polypeptide as found in its naturally occurring environment. Thus, an isolated or purified polypeptide is substantially free of other cellular material, or culture medium when produced by recombinant techniques, or substantially free of chemical precursors or other chemicals when chemically synthesized. A protein that is substantially free of cellular material includes preparations of protein having less than about 30%, 20%, 10%, 5%, or 1% (by dry weight) of contaminating protein. When the protein of the invention or biologically active portion thereof is recombinantly produced, optimally culture medium represents less than about 30%, 20%, 10%, 5%, or 1% (by dry weight) of chemical precursors or non-protein-of-interest chemicals. Similarly, an “isolated” polynucleotide or nucleic acid molecule is removed from its naturally occurring environment. An isolated polynucleotide is substantially free of chemical precursors or other chemicals when chemically synthesized or has been removed from a genomic locus via the breaking of phosphodiester bonds. An isolated polynucleotide can be part of a vector, a composition of matter or can be contained within a cell so long as the cell is not the original environment of the polynucleotide.

[0281] Particular methods provided herein for binding and/or cleaving a target nucleic acid molecule comprising a target sequence of interest involve the use of an in vitro assembled RGN ribonucleoprotein complex. In vitro assembly of an RGN ribonucleoprotein complex can be performed using any method known in the art in which an RGN polypeptide is contacted with a guide RNA under conditions to allow for binding of the RGN polypeptide to the guide RNA. As used herein, “contact”, contacting”, “contacted,” refer to placing the components of a desired reaction together under conditions suitable for carrying out the desired reaction. The RGN polypeptide can be purified from a biological sample, cell lysate, or culture medium, produced via in vitro translation, or chemically synthesized. The guide RNA can be purified from a biological sample, cell lysate, or culture medium, transcribed in vitro, or chemically synthesized. The RGN polypeptide and guide RNA can be brought into contact in solution (e.g., buffered saline solution) to allow for in vitro assembly of the RGN ribonucleoprotein complex.

### VII. Methods of Binding, Cleaving, or Modifying a Target Nucleic Acid Molecule

[0282] The present disclosure provides methods for binding, cleaving, and/or modifying a target nucleic acid molecule (e.g., target DNA) of interest comprising a target sequence. The methods include delivering a system comprising at least one guide RNA or a polynucleotide encoding the same, and at least one RGN polypeptide or a polynucleotide encoding the same to the target sequence or a cell, organelle, or embryo comprising the target sequence. In some of these embodiments, the RGN comprises any one of the amino acid sequences set forth as SEQ ID NOs:1-20, or an active variant or fragment thereof. In various embodiments, the guide RNA comprises a CRISPR repeat comprising any one of the nucleotide sequences set forth as SEQ ID NOs: 21-41, or nucleotides 1-17 of SEQ ID NO: 1041 or 1042, or nucleotides 1-22 of SEQ ID NO: 1044 or 1045, or an active variant or fragment thereof. In particular embodiments, the guide RNA comprises a tracrRNA comprising any one of the nucleotide sequences set forth as SEQ ID NOs: 42-62, nucleotides 19-111 of SEQ ID NO: 1040, nucleotides 22-85 of SEQ ID NO: 1041 or 1042, nucleotides 24-138 of SEQ ID NO: 143, nucleotides 27-96 of SEQ ID NO: 1044, or nucleotides 27-95 of SEQ ID NO: 1045, or an active variant or fragment thereof. The guide RNA of the system can be a single guide RNA or a dual-guide RNA.

[0283] The RGN of the system may be a nuclease dead RGN, have nickase activity, or may be a fusion polypeptide. In some embodiments, the fusion polypeptide comprises a base-editing polypeptide, for example a cytosine deaminase or an adenine deaminase. In other embodiments, the RGN fusion protein comprises a reverse transcriptase. In other embodiments, the RGN fusion protein comprises a polypeptide that recruits members of a functional nucleic acid repair complex, such as a member of the nucleotide excision repair (NER) or transcription coupled-nucleotide excision repair (TC-NER) pathway (Wei et al., 2015, PNAS USA 112(27):E3495-504; Troelstra et al., 1992, Cell 71:939-953; Marnef et al., 2017, J Mol Biol 429(9):1277-1288), as described in U.S. Provisional Application No. 63/332,486, which was filed on Apr. 19, 2022, and is incorporated by reference in its entirety. In some embodiments, the RGN fusion protein comprises CSB (van den Boom et al., 2004, J Cell Biol 166(1):27-36; van Gool et al., 1997, EMBO J 16(19):5955-65; an example of which is set forth as SEQ ID NO: 563), which is a member of the TC-NER (nucleotide excision repair) pathway and functions in the recruitment of other members. In further embodiments, the RGN fusion protein comprises an active domain of CSB, such as the acidic domain of CSB which comprises amino acid residues 356-394 of SEQ ID NO: 563 (Teng et al., 2018, Nat Commun 9(1):4115).

[0284] In particular embodiments, the RGN and/or guide RNA is heterologous to the cell, organelle, or embryo to which the RGN and/or guide RNA (or polynucleotide(s) encoding at least one of the RGN and guide RNA) are introduced.

[0285] In those embodiments wherein the method comprises delivering a polynucleotide encoding a guide RNA and/or an RGN polypeptide, the cell or embryo can then be cultured under conditions in which the guide RNA and/or RGN polypeptide are expressed. In various embodiments, the method comprises contacting a target nucleic acid molecule with an RGN ribonucleoprotein complex. The RGN ribonucleoprotein complex may comprise an RGN that is nuclease dead or has nickase activity. In some embodiments, the RGN of the ribonucleoprotein complex is a fusion polypeptide comprising a base-editing polypeptide. In certain embodiments, the method comprises introducing into a cell, organelle, or embryo comprising a target nucleic acid molecule an RGN ribonucleoprotein complex. The RGN ribonucleoprotein complex can be one that has been purified from a biological sample, recombinantly produced and subsequently purified, or in vitro-assembled as described herein. In those embodiments wherein the RGN ribonucleoprotein complex that is contacted with the target nucleic acid molecule or a cell organelle, or embryo has been assembled in vitro, the method can further comprise the in vitro assembly of the complex prior to contact with the target nucleic acid molecule, cell, organelle, or embryo.

[0286] A purified or in vitro assembled RGN ribonucleoprotein complex can be introduced into a cell, organelle, or embryo using any method known in the art, including, but not limited to electroporation. Alternatively, an RGN polypeptide and/or polynucleotide encoding or comprising the guide RNA can be introduced into a cell, organelle, or embryo using any method known in the art (e.g., electroporation).

[0287] Upon delivery to or contact with the target nucleic acid molecule or cell, organelle, or embryo comprising the target nucleic acid molecule, the guide RNA directs the RGN to bind to the target sequence within the target nucleic acid molecule in a sequence-specific manner. In those embodiments wherein the RGN has nuclease activity, the RGN polypeptide cleaves the target sequence of interest upon binding. The target DNA sequence can subsequently be modified via endogenous repair mechanisms, such as non-homologous end joining, or homology-directed repair with a provided donor polynucleotide.

[0288] Methods to measure binding of an RGN polypeptide to a target sequence are known in the art and include chromatin immunoprecipitation assays, gel mobility shift assays, DNA pull-down assays, reporter assays, microplate capture and detection assays. Likewise, methods to measure cleavage or modification of a target nucleic acid molecule comprising a target sequence are known in the art and include in vitro or in vivo cleavage assays wherein cleavage is confirmed using PCR, sequencing, or gel electrophoresis, with or without the attachment of an appropriate label (e.g., radioisotope, fluorescent substance) to the target sequence to facilitate detection of degradation products. Alternatively, the nicking triggered exponential amplification reaction (NTEXPAR) assay can be used (see, e.g., Zhang et al. (2016) Chem. Sci. 7:4951-4957). In vivo cleavage can be evaluated using the Surveyor assay (Guschin et al. (2010) Methods Mol Biol 649:247-256).

[0289] In some embodiments, the methods involve the use of a single type of RGN complexed with more than one guide RNA. The more than one guide RNA can target different regions of a single gene or can target multiple genes.

[0290] In those embodiments wherein a donor polynucleotide is not provided, a double-stranded break introduced by an RGN polypeptide can be repaired by a non-homologous end-joining (NHEJ) repair process. Due to the error-prone nature of NHEJ, repair of the double-stranded break can result in a modification to the target sequence. As used herein, a “modification” in reference to a nucleic acid molecule refers to a change in the nucleotide sequence of the nucleic acid molecule, which can be a deletion, insertion, or substitution of one or more nucleotides, or a combination thereof. Modification of the target nucleic acid molecule comprising a target sequence can result in the expression of an altered protein product or inactivation of a coding sequence.

[0291] In those embodiments wherein a donor polynucleotide is present, the donor sequence in the donor polynucleotide can be integrated into or exchanged with the target nucleotide sequence during the course of repair of the introduced double-stranded break, resulting in the introduction of the exogenous donor sequence. A donor polynucleotide thus comprises a donor sequence that is desired to be introduced into a target sequence of interest. In some embodiments, the donor sequence alters the original target nucleotide sequence such that the newly integrated donor sequence will not be recognized and cleaved by the RGN. Integration of the donor sequence can be enhanced by the inclusion within the donor polynucleotide of flanking sequences, referred to herein as “homology arms” that have substantial sequence identity with the sequences flanking the target nucleotide sequence, allowing for a homology-directed repair process. In some embodiments, homology arms have a length of at least 50 base pairs, at least 100 base pairs, and up to 2000 base pairs or more, and have at least 90%, at least 95%, or more, sequence homology to their corresponding sequence within the target nucleotide sequence.

[0292] In those embodiments wherein the RGN polypeptide introduces double-stranded staggered breaks, the donor polynucleotide can comprise a donor sequence flanked by compatible overhangs, allowing for direct ligation of the donor sequence to the cleaved target nucleotide sequence comprising overhangs by a non-homologous repair process during repair of the double-stranded break.

[0293] In those embodiments wherein the method involves the use of an RGN that is a nickase (i.e., is only able to cleave a single strand of a double-stranded polynucleotide), the method can comprise introducing two RGN nickases that target identical or overlapping target sequences and cleave different strands of the polynucleotide. For example, an RGN nickase that only cleaves the positive (+) strand of a double-stranded polynucleotide can be introduced along with a second RGN nickase that only cleaves the negative (−) strand of a double-stranded polynucleotide.

[0294] In various embodiments, a method is provided for binding a target nucleotide sequence and detecting the target sequence, wherein the method comprises introducing into a cell, organelle, or embryo at least one guide RNA or a polynucleotide encoding the same, and at least one RGN polypeptide or a polynucleotide encoding the same, expressing the guide RNA and/or RGN polypeptide (if coding sequences are introduced), wherein the RGN polypeptide is a nuclease-dead RGN and further comprises a detectable label, and the method further comprises detecting the detectable label. The detectable label may be fused to the RGN as a fusion protein (e.g., fluorescent protein) or may be a small molecule conjugated to or incorporated within the RGN polypeptide that can be detected visually or by other means.

[0295] Also provided herein are methods for modulating the expression of a target gene of interest comprising a target sequence or a gene under the regulation of a target sequence. The methods comprise introducing into a cell, organelle, or embryo at least one guide RNA or a polynucleotide encoding the same, and at least one RGN polypeptide or a polynucleotide encoding the same, expressing the guide RNA and/or RGN polypeptide (if coding sequences are introduced), wherein the RGN polypeptide is a nuclease-dead RGN. In some of these embodiments, the nuclease-dead RGN is a fusion protein comprising an expression modulator domain (i.e., epigenetic modification domain, transcriptional activation domain or a transcriptional repressor domain) as described herein.

[0296] The present disclosure also provides methods for binding and/or modifying a target nucleic acid molecule of interest comprising a target sequence. The methods include delivering a system comprising at least one guide RNA or a polynucleotide encoding the same, and at least one fusion polypeptide comprising an RGN of the invention and a base-editing polypeptide, for example a cytosine deaminase or an adenine deaminase, or a polynucleotide encoding the fusion polypeptide, to the target sequence or a cell, organelle, or embryo comprising the target sequence.

[0297] In some embodiments wherein a fusion polypeptide comprising an RGN and a base-editing polypeptide is utilized, the binding of the fusion protein to a target sequence results in the modification of nucleotide(s) adjacent to the target sequence. The nucleobase adjacent to the target sequence that is modified by the deaminase may be 1, 2, 3, 4, 5, 6, 7, 8, 9, 10, 11, 12, 13, 14, 15, 16, 17, 18, 19, 20, 25, 30, 35, 40, 45, 50, 55, 60, 65, 70, 75, 80, 85, 90, 95, or 100 base pairs from the 5′ or 3′ end of the target sequence.

[0298] One of ordinary skill in the art will appreciate that any of the presently disclosed methods can be used to target a single target sequence or multiple target sequences. Thus, methods comprise the use of a single RGN polypeptide in combination with multiple, distinct guide RNAs, which can target multiple, distinct sequences within a single gene and/or multiple genes. Also encompassed herein are methods wherein multiple, distinct guide RNAs are introduced in combination with multiple, distinct RGN polypeptides. These guide RNAs and guide RNA/RGN polypeptide systems can target multiple, distinct sequences within a single gene and/or multiple genes.

[0299] In one aspect, the invention provides kits containing any one or more of the elements disclosed in the above methods and compositions, including crRNAs, tracrRNAs, guide RNAs, RGNs, and/or polynucleotides encoding the same, cells, and RGN systems. In some embodiments, the kit comprises a vector system and instructions for using the kit. In some embodiments, the vector system comprises (a) a first regulatory element operably linked to a DNA sequence encoding a guide RNA and one or more insertion sites for inserting a guide sequence upstream of the encoded guide RNA, wherein when expressed, the guide RNA directs sequence-specific binding of an RGN complex to a target sequence in a eukaryotic cell, wherein the RGN complex comprises an RGN enzyme complexed with the guide RNA polynucleotide; and/or (b) a second regulatory element operably linked to an enzyme coding sequence encoding said RGN enzyme comprising a nuclear localization sequence. In some embodiments, the kit further comprises a homologous recombination template polynucleotide. Elements may be provided individually or in combinations, and may be provided in any suitable container, such as a vial, a bottle, or a tube.

[0300] In some embodiments, the kit includes instructions in one or more languages. In some embodiments, a kit comprises one or more reagents for use in a process utilizing one or more of the elements described herein. Reagents may be provided in any suitable container. For example, a kit may provide one or more reaction or storage buffers. Reagents may be provided in a form that is usable in a particular assay, or in a form that requires addition of one or more other components before use (e.g. in concentrate or lyophilized form). A buffer can be any buffer, including but not limited to a sodium carbonate buffer, a sodium bicarbonate buffer, a borate buffer, a Tris buffer, a MOPS buffer, a HEPES buffer, and combinations thereof. In some embodiments, the buffer is alkaline. In some embodiments, the buffer has a pH from about 7 to about 10.

[0301] In one aspect, the invention provides methods for using one or more elements of an RGN system. The RGN system of the invention provides an effective means for modifying a target polynucleotide. The RGN system of the invention has a wide variety of utility including modifying (e.g., deleting, inserting, translocating, inactivating, activating, base editing) a target polynucleotide in a multiplicity of cell types. As such the RGN system of the invention has a broad spectrum of applications in, e.g., gene therapy, drug screening, disease diagnosis, and prognosis. An exemplary RGN system, or RGN complex, comprises an RGN enzyme complexed with a guide sequence capable of binding to a target sequence.

### IX. Target Polynucleotides

[0302] In one aspect, the invention provides for methods of modifying a target polynucleotide comprising a target sequence or modifying the expression of a target polynucleotide in a eukaryotic cell, which may be in vivo, ex vivo or in vitro. In some embodiments, the method comprises sampling a cell or population of cells from a human or non-human animal or plant (including microalgae) and modifying the cell or cells. Culturing may occur at any stage ex vivo. The cell or cells may even be re-introduced into the non-human animal or plant (including micro-algae).

[0303] Using natural variability, plant breeders combine most useful genes for desirable qualities, such as yield, quality, uniformity, hardiness, and resistance against pests. These desirable qualities also include growth, day length preferences, temperature requirements, initiation date of floral or reproductive development, fatty acid content, insect resistance, disease resistance, nematode resistance, fungal resistance, herbicide resistance, tolerance to various environmental factors including drought, heat, wet, cold, wind, and adverse soil conditions including high salinity The sources of these useful genes include native or foreign varieties, heirloom varieties, wild plant relatives, and induced mutations, e.g., treating plant material with mutagenic agents. Using the present invention, plant breeders are provided with a new tool to induce mutations. Accordingly, one skilled in the art can analyze the genome for sources of useful genes, and in varieties having desired characteristics or traits employ the present invention to induce the rise of useful genes, with more precision than previous mutagenic agents and hence accelerate and improve plant breeding programs.

[0304] The target polynucleotide of an RGN system can be any polynucleotide endogenous or exogenous to the eukaryotic cell. For example, the target polynucleotide can be a polynucleotide residing in the nucleus of the eukaryotic cell. The target polynucleotide can be a sequence coding a gene product (e.g., a protein) or a non-coding sequence (e.g., a regulatory polynucleotide or a junk DNA). Without wishing to be bound by theory, the target strand of the target sequence should be adjacent to a PAM (protospacer adjacent motif); that is, a short sequence recognized by the RGN system. The precise sequence and length requirements for the PAM differ depending on the RGN used, but PAMs are typically 2-7 base pair sequences adjacent to the protospacer (that is, the target sequence).

[0305] The target polynucleotide of an RGN system may include a number of disease-associated genes and polynucleotides as well as signaling biochemical pathway-associated genes and polynucleotides. Examples of target polynucleotides include a sequence associated with a signaling biochemical pathway, e.g., a signaling biochemical pathway-associated gene or polynucleotide. Examples of target polynucleotides include a disease associated gene or polynucleotide. A “disease-associated” gene or polynucleotide refers to any gene or polynucleotide which is yielding transcription or translation products at an abnormal level or in an abnormal form in cells derived from a disease-affected tissues compared with tissues or cells of a non-disease control. It may be a gene that becomes expressed at an abnormally high level; it may be a gene that becomes expressed at an abnormally low level, where the altered expression correlates with the occurrence and/or progression of the disease. A disease-associated gene also refers to a gene possessing mutation(s) or genetic variation that is directly responsible or is in linkage disequilibrium with a gene(s) that is responsible for the etiology of a disease (e.g., a causal mutation). The transcribed or translated products may be known or unknown, and further may be at a normal or abnormal level. In some embodiments, the disease may be an animal disease. In some embodiments, the disease may be an avian disease. In other embodiments, the disease may be a mammalian disease. In further embodiments, the disease may be a human disease. Examples of disease-associated genes and polynucleotides in humans are available from McKusick-Nathans Institute of Genetic Medicine, Johns Hopkins University (Baltimore, Md.) and National Center for Biotechnology Information, National Library of Medicine (Bethesda, Md.), available on the World Wide Web.

[0306] Although RGN systems are particularly useful for their relative ease in targeting to genomic sequences of interest, there still remains an issue of what the RGN can do to address a causal mutation. One approach is to produce a fusion protein between an RGN (e.g., an inactive or nickase variant of the RGN) and a base-editing enzyme or the active domain of a base editing enzyme, such as a cytosine deaminase or an adenine deaminase base editor (U.S. Pat. No. 9,840,699, herein incorporated by reference). In some embodiments, the methods comprise contacting a DNA molecule comprising a target sequence with (a) a fusion protein comprising an RGN of the invention or a nickase variant thereof and a base-editing polypeptide such as a deaminase; and (b) a gRNA targeting the fusion protein of (a) to the target sequence; wherein the DNA molecule is contacted with the fusion protein and the gRNA in an amount effective and under conditions suitable for the deamination of a nucleobase. In some embodiments, the target DNA sequence comprises a sequence associated with a disease or disorder, and wherein the deamination of the nucleobase results in a sequence that is not associated with a disease or disorder. In some embodiments, the target DNA sequence resides in an allele of a crop plant, wherein the particular allele of the trait of interest results in a plant of lesser agronomic value. The deamination of the nucleobase results in an allele that improves the trait and increases the agronomic value of the plant.

[0307] In some embodiments, the target DNA sequence comprises a T4C or A4G point mutation associated with a disease or disorder, and wherein the deamination of the mutant C or G base results in a sequence that is not associated with a disease or disorder. In some embodiments, the deamination corrects a point mutation in the sequence associated with the disease or disorder.

[0308] In some embodiments, the sequence associated with the disease or disorder encodes a protein, and wherein the deamination introduces a stop codon into the sequence associated with the disease or disorder, resulting in a truncation of the encoded protein. In some embodiments, the contacting is performed in vivo in a subject susceptible to having, having, or diagnosed with the disease or disorder. In some embodiments, the disease or disorder is a disease associated with a point mutation, or a single-base mutation, in the genome. In some embodiments, the disease is a genetic disease, a cancer, a metabolic disease, or a lysosomal storage disease.

### X. Pharmaceutical Compositions and Methods of Treatment

[0309] Pharmaceutical compositions comprising the presently disclosed RGN polypeptides and active variants and fragments thereof, as well as polynucleotides encoding the same, the presently disclosed crRNAs and active variants and fragments thereof or polynucleotides encoding the same, the presently disclosed tracrRNAs and active variants and fragments thereof or polynucleotides encoding the same, the presently disclosed gRNAs or polynucleotides encoding the same, the presently disclosed systems, or cells comprising any of the RGN polypeptides or RGN-encoding polynucleotides, gRNA or gRNA-encoding polynucleotides, or the RGN systems, and a pharmaceutically acceptable carrier are provided.

[0310] A pharmaceutical composition is a composition that is employed to prevent, reduce in intensity, cure or otherwise treat a target condition or disease that comprises an active ingredient (i.e., RGN polypeptides, RGN-encoding polynucleotides, gRNA, gRNA-encoding polynucleotides, RGN systems, or cells comprising any one of these) and a pharmaceutically acceptable carrier.

[0311] As used herein, a “pharmaceutically acceptable carrier” refers to a material that does not cause significant irritation to an organism and does not abrogate the activity and properties of the active ingredient (i.e., RGN polypeptides, RGN-encoding polynucleotides, gRNA, gRNA-encoding polynucleotides, RGN systems, or cells comprising any one of these). Carriers must be of sufficiently high purity and of sufficiently low toxicity to render them suitable for administration to a subject being treated. The carrier can be inert, or it can possess pharmaceutical benefits. In some embodiments, a pharmaceutically acceptable carrier comprises one or more compatible solid or liquid filler, diluents or encapsulating substances which are suitable for administration to a human or other vertebrate animal. In some embodiments, the pharmaceutically acceptable carrier is not naturally-occurring. In some embodiments, the pharmaceutically acceptable carrier and the active ingredient are not found together in nature.

[0312] Pharmaceutical compositions used in the presently disclosed methods can be formulated with suitable carriers, excipients, and other agents that provide suitable transfer, delivery, tolerance, and the like. A multitude of appropriate formulations are known to those skilled in the art. See, e.g., Remington, The Science and Practice of Pharmacy (21st ed. 2005). Suitable formulations include, for example, powders, pastes, ointments, jellies, waxes, oils, lipids, lipid (cationic or anionic) containing vesicles (such as LIPOFECTIN vesicles), lipid nanoparticles, DNA conjugates, anhydrous absorption pastes, oil-in-water and water-in-oil emulsions, emulsions carbowax (polyethylene glycols of various molecular weights), semi-solid gels, and semi-solid mixtures containing carbowax. Pharmaceutical compositions for oral or parenteral use may be prepared into dosage forms in a unit dose suited to fit a dose of the active ingredients. Such dosage forms in a unit dose include, for example, tablets, pills, capsules, injections (ampoules), suppositories, etc.

[0313] The disclosure provides for pharmaceutical compositions comprising lipid-based formulations including an active ingredient (i.e., guide RNAs and/or RGNs, or polynucleotides comprising or encoding such). In some embodiments, the lipid-based formulations include liposomes. In some embodiments, the lipid-based formulations include lipid nanoparticles (LNPs). In some embodiments, an active ingredient is encapsulated in the lipid particle and/or disposed on the surface of the lipid particle. In some embodiments, an active ingredient is covalently attached to the lipid particle. In some embodiments, an active ingredient is non-covalently associated with the lipid particle. A covalent attachment includes the sharing of electrons in a chemical bond. Non-covalent interactions include dispersed electromagnetic interactions such as hydrogen bonds, ionic bonds, van der Waals interactions, and hydrophobic bonds.

[0314] In some embodiments, an active ingredient is encapsulated in the lipid particle. The term “encapsulate” means to enclose, surround or encase. As it relates to the formulation of the compounds of the disclosure, encapsulation may be substantial, complete or partial. The term “substantially encapsulated” or “substantial encapsulation” means that greater than 50%, 60%, 70%, 80%, 85%, 90%, 95%, 96%, 97%, 98%, 99%, 99.9%, or greater of the pharmaceutical composition or active ingredient of the disclosure may be enclosed, surrounded, or encased within a delivery agent (e.g., liposome or LNP). The term “partially encapsulated” or “partial encapsulation” means that less than 50%, 40%, 30%, 20%, 10%, or less of the pharmaceutical composition or active ingredient of the disclosure may be enclosed, surrounded, or encased within the delivery agent. Encapsulation may be determined by measuring the escape or the activity of the pharmaceutical composition or active ingredient of the disclosure using fluorescence and/or electron microscopy. For example, at least 1%, 5%, 10%, 20%, 30%, 40%, 50%, 60%, 70%, 80%, 85%, 90%, 95%, 96%, 97%, 98%, 99%, 99.9%, or greater of the pharmaceutical composition or active ingredient of the disclosure is encapsulated in a delivery agent (e.g., liposome or LNP).

[0315] Liposomes are spherical vesicle structures composed of a uni- or multilamellar lipid bilayer surrounding internal aqueous compartments and a relatively impermeable outer lipophilic phospholipid bilayer. Liposomes have gained considerable attention as drug delivery carriers because they are biocompatible, nontoxic, can deliver both hydrophilic and lipophilic drug molecules, protect their cargo from degradation by plasma enzymes, and transport their load across biological membranes and the blood brain barrier (BBB) (see, e.g., Spuch and Navarro (2011) Journal of drug delivery 2011).

[0316] Liposomes can be made from several different types of lipids; however, phospholipids are most commonly used to generate liposomes as drug carriers. Although liposome formation is spontaneous when a lipid film is mixed with an aqueous solution, it can also be expedited by applying force in the form of shaking by using a homogenizer, sonicator, or an extrusion apparatus (see, e.g., Spuch and Navarro (2011) Journal of drug delivery 2011).

[0317] A conventional liposome formulation is mainly comprised of natural phospholipids and phospholipids such as 1,2-distearoryl-sn-glycero-3-phosphatidyl choline (DSPC), sphingomyelin, egg phosphatidylcholines, and monosialoganglioside. In some embodiments, 1,2-dioleoyl-sn-glycero-3-phosphoethanolamine (DOPE) increases stability of a liposome.

[0318] Additives may be added to liposomes in order to modify their structure and properties. In some embodiments, cholesterol and/or sphingomyelin may be added to a liposomal mixture to help stabilize the liposomal structure and to prevent leakage of the liposomal inner cargo. In some embodiments, addition of cholesterol to a conventional liposome formulation reduces rapid release of the encapsulated active ingredient (i.e., guide RNAs and/or RGNs, or polynucleotides comprising or encoding such) into the plasma. In some embodiments, liposomes are prepared from hydrogenated egg phosphatidylcholine or egg phosphatidylcholine, cholesterol, and dicetyl phosphate. In some embodiments, mean liposome vesicle size is adjusted to about 50 or 100 nm.

[0319] In some embodiments, Trojan Horse liposomes (also known as Molecular Trojan Horses or PEGylated immunoliposomes) may be used in pharmaceutical compositions for delivery of an active ingredient across the BBB (described on World Wide Web at cshprotocols.cshlp.org/content/2010/4/pdb.prot5407.long). Without being bound by any theory, it is believed that neutral lipid particles with specific antibodies conjugated to the surface allows crossing of the BBB via endocytosis. In some embodiments, pharmaceutical compositions comprising Trojan Horse liposomes may be used to deliver an active ingredient (i.e., guide RNAs and/or RGNs, or polynucleotides comprising or encoding such) to the brain via an intravascular injection.

[0320] In some embodiments, liposomes include stable nucleic-acid-lipid particles (SNALP) (see, e.g., Morrissey et al. (2005) Nature Biotechnology 23(8):1002-1007; Zimmerman et al. (2006) Nature 441: 111-114). SNALPs include a mixture of cationic and fusogenic lipids and coated with polyethylene glycol (PEG) that allow cellular uptake and endosomal release of an active ingredient cargo. In some embodiments, a SNALP is a class of LNP and includes an ionizable lipid that is cationic at low pH (e.g., DLinDMA), a neutral helper lipid, cholesterol, and a diffusible polyethylene glycol (PEG)-lipid. In some embodiments, a SNALP formulation includes the following lipids: 3-N-(-methoxy poly(ethylene glycol)2000) carbamoyl-1,2-dimyrestyloxy-propylamine (PEG-cDMA); 1,2-dilinoleyloxy-N,N-dimethyl-3-aminopropane (DLinDMA); 1,2-distearoyl-sn-glycero-3-phosphocholine (DSPC); and cholesterol. In some embodiments, a SNALP includes synthetic cholesterol, dipalmitoylphosphatidylcholine (DOPC), PEG-cDMA, and DLinDMA (see, e.g., Geisbert et al. (2010) Lancet 375:1896-1905). In some embodiments, a SNALP includes synthetic cholesterol, DSPC, PEG-cDMA, and DLinDMA (see, e.g., Judge et al. (2009) J. Clin. Invest. 119:661-673). In some embodiments, SNALP liposomes are about 80-100 nm in size. SNALPs have been used as effective delivery molecules to highly vascularized HepG2-derived liver tumors (see, e.g., Li et al. (2012) Gene Therapy 19:775-780).

[0321] Without being bound by any one theory, during formulation of SNALPs, the ionizable lipid serves to condense lipid with an active ingredient (e.g., a nucleic acid molecule) during particle formation. When positively charged under increasingly acidic endosomal conditions, the ionizable lipid may mediate the fusion of a SNALP with the endosomal membrane, enabling release of the active ingredient into the cytoplasm. The PEG-lipid may stabilize the particle and reduce aggregation during formulation, and subsequently may provide a neutral hydrophilic exterior that improves pharmacokinetic properties. In some embodiments, SNALP liposomes are prepared by formulating DLinDMA and PEG-cDMA with DSPC, cholesterol and an active ingredient using a 25:1 lipid:active ingredient ratio and a 48:40:10:2 molar ratio of cholesterol:DLinDMA:DSPC:PEG-cDMA.

[0322] In some embodiments, a pharmaceutical composition of the disclosure includes LNPs. In some embodiments, lipids may be formulated with an active ingredient of the present disclosure to form LNPs. An LNP comprises a plurality of lipid molecules physically associated with each other by intermolecular forces. In some embodiments, LNPs include liposomes. In some embodiments, LNPs differ from liposomes in not having a continuous lipid bilayer. In some embodiments, LNPs comprise solid particles having a mixture of solid and liquid lipids. In some embodiments, LNPs include dendrimer lipid nanoparticles (DLNPs), SNALPs, and lipid-like nanoparticles (LLNPs). In general, a “nanoparticle” refers to any particle having a diameter of less than 1000 nanometers (nm). In some embodiments, nanoparticles have a diameter of 500 nm or less. In some embodiments, nanoparticles have a diameter ranging between 25 nm and 200 nm, or 100 nm or less. In some embodiments, nanoparticles have a diameter ranging between 35 nm and 60 nm. In some embodiments, an LNP includes a lipid particle between about 1 and about 100 nm in size.

[0323] LNPs include four components: ionizable cationic lipids, fusogenic zwitterionic phospholipids, cholesterol, and PEGylated (PEG) lipids. In some embodiments, the ionizable cationic lipid component complexes a negatively charged polynucleotide and enhances endosomal escape). In some embodiments, the phospholipid component functions in modifying lipid bilayer structure. In some embodiments, the cholesterol component helps to stabilize an LNP. In some embodiments, the PEG lipid component decreases LNP aggregation and non-specific uptake.

[0324] Ionizable cationic lipids useful in LNPs include: 1,2-dilineoyl-3-dimethylammonium-propane (DLinDAP); DLinDMA; 1,2-dilinoleyloxy-keto-N,N-dimethyl-3-aminopropane (DLinK-DMA); 1,2-dilinoleyl-4-(2-dimethylaminoethyl)-[1,3]-dioxolane (DLinKC2-DMA); 5A2-SC8 (Zhou et al. (2016) Proc. Natl Acad. Sci. USA 113:520-525); C12-200 (Love et al. (2010) Proc. Natl Acad. Sci. USA 107:1864-1869); 246C10 (Kim et al. (2021) Sci Adv 7(9): eabf4398); cKK-E12 (Fenton et al. (2016) Advanced Materials 28(15):2939-2943); 1,2-distearyloxy-N,N-dimethyl-3-aminopropane (DSDMA); 1,2-dioleyloxy-N,N-dimethyl-3-aminopropane (DODMA); 1,2-dilinolenyloxy-N,N-dimethyl-3-aminopropane (DLenDMA); and dilinoleylmethyl-4-dimethylaminobutyrate (Dlin-MC3-DMA; Jayaraman et al. (2012) Angew Chem Int Ed Engl. 51(34): 8529-8533). Cationic lipids are further described in International Publication Nos. WO2012040184, WO2011153120, WO2011149733, WO2011090965, WO2011043913, WO2011022460, WO2012061259, WO2012054365, WO2012044638, WO2010080724, WO201021865 and WO2008103276, U.S. Pat. Nos. 7,893,302 and 7,404,969 and US Patent Publication No. US20100036115, each of which is herein incorporated by reference in their entirety.

[0325] Zwitterionic phospholipids useful for LNPs include DSPC, DOPE, and DOPC.

[0326] PEG lipids useful for LNPs include: 1,2-dimyristoyl-rac-glycero-3-methoxypolyethylene glycol (PEG-DMG); (3-o-[2-(methoxypolyethyleneglycol 2000) succinoyl]-1,2-dimyristoyl-sn-glycol (PEG-S-DMG); R-3-[(ω-methoxy-poly(ethylene glycol)2000) carbamoyl]-1,2-dimyristyloxlpropyl-3-amine (PEG-C-DOMG); and C16 PEG-ceramide. In some embodiments, an LNP includes 50:10:38.5:1.5 molar ratio of DLinKC2-DMA or C12-200:DSPC:cholesterol:PEG-DMG (see, e.g., Basha et al. (2011) Molecular Therapy 19(12):2186-2200). In some embodiments, an LNP includes 26.5:20:52:1.5 ionizable lipid:DOPE:cholesterol:PEG lipid (see, e.g., Han et al. (2022) Sci Adv 8(3): eabj6901; Kim et al. (2021) Sci Adv 7(9): eabf4398). PEG lipids are further described in WO2012099755. In some embodiments, the ratio of PEG in the LNP formulations may be increased or decreased and/or the carbon chain length of the PEG lipid may be modified from C14 to C18 to alter the pharmacokinetics and/or biodistribution of the LNP formulations.

[0327] In some embodiments, the charge of an LNP is taken into consideration. Cationic lipids may combine with negatively charged lipids to induce non-bilayer structures that facilitate intracellular delivery. Because charged LNPs are rapidly cleared from circulation following intravenous injection, ionizable cationic lipids with pKa values below 7 were developed (see, e.g., Basha et al. (2011) Molecular Therapy 19(12):2186-2200). Negatively charged polymers such as polynucleotides may be loaded into LNPs at low pH values (e.g., pH 4) where the ionizable lipids display a positive charge. However, at physiological pH values, the LNPs exhibit a low surface charge compatible with longer circulation times.

[0328] Preparation of LNPs and encapsulation of an active ingredient are described in e.g., Basha et al. (2011) Molecular Therapy 19(12):1286-2200; Han et al. (2022) Sci Adv 8(3): eabj6901; Kim et al. (2021) Sci Adv 7(9): eabf4398; Finn et al. (2018) Cell Reports 22:2227-2235; Wei et al. (2020) Nature Communications 11:3232; WO2011127255; and WO2008103276. Lipids are commercially available (e.g., from Tekmira Pharmaceuticals, Vancouver, Canada; Avanti Polar Lipids, Inc., Alabaster, AL) or may be synthesized (e.g., Kim et al. (2021) Sci Adv 7(9): eabf4398). Synthesis of cationic lipids are also described in International Publication Nos. WO2012040184, WO2011153120, WO2011149733, WO2011090965, WO2011043913, WO2011022460, WO2012061259, WO2012054365, WO2012044638, WO2010080724 and WO201021865. Cholesterol is commercially available (e.g., from Sigma-Aldrich, St Louis, MO).

[0329] In some embodiments, encapsulation may be performed by dissolving lipid mixtures comprising cationic lipid (e.g., Dlin-DMA): phospholipid (e.g., DSPC, DOPE): cholesterol: PEG-lipid (e.g., at 40:10:40:10 molar ratio) in ethanol. An active ingredient (e.g., a polynucleotide comprising or encoding a guide RNA or RGN of the disclosure) may be dissolved in an acidic buffer (e.g., citrate, acetate), pH 3 or 4. In some embodiments, the lipid solution and active ingredient solution may be mixed using a microfluidics system (Chen et al. (2012) J. Amer. Chem. Soc. 134:6948-6951; e.g., NanoAssemblr from Precision Nanosystems) or by dropwise addition of the lipid solution to the active ingredient solution. Removal of ethanol and neutralization of formulation buffer may be performed by dialysis for, e.g., 16 hours or overnight, against phosphate-buffered saline (PBS) using dialysis cassettes (e.g., 3500 molecular weight cut-off cassettes from Life Technologies). Dynamic light scattering may be used to assess LNP size, polydispersity index (PDI), and zeta potential. Encapsulation efficiency of an active ingredient such as RNA may be determined by assays such as Quant-it™ Ribogreen Assay (Thermo Fisher). In some embodiments wherein the encapsulated active ingredient is a polynucleotide, the polynucleotide may be extracted from the eluted nanoparticles and quantified at 260 nm. LNP pKa may be assessed using a 2-(p-toluidino)-6-napthalene sulfonic acid (TNS) assay (Zhang et al. (2011) Langmuir 27(5):1907-1914). In some embodiments, a final lipid: active ingredient weight ratio includes 12:1, 11:1, 10:1, 9:1, 8:1, 7:1, 6:1, and 5:1.

[0330] In some embodiments where a pharmaceutical composition comprises a ribonucleoprotein (RNP) complex (i.e. RGN and guide RNA) encapsulated in an LNP, inclusion of an additional permanent cationic lipid (e.g., 1,2-dioleoyl-3-trimethylammonium-propane (DOTAP)) allows formation of LNPs comprising RNP by mixing an ethanol solution of lipids with a solution of RNP at physiological pH (e.g., PBS buffer; Wei et al. (2020) Nature Communications 11:3232). In some embodiments, the permanent cationic lipid is included at 10 to 20 mole % of total lipids in LNPs.

[0331] In some embodiments, the LNP formulations described herein may additionally comprise a permeability enhancer molecule. Non-limiting permeability enhancer molecules are described in US2005/0222064.

[0332] In some embodiments, the LNP compositions are biodegradable, in that they do not accumulate to cytotoxic levels in vivo at a therapeutically effective dose. LNP formulations may be improved by replacing the cationic lipid with a biodegradable cationic lipid which is known as a rapidly eliminated lipid nanoparticle (reLNP). In some embodiments, the rapid metabolism of the rapidly eliminated lipids can improve the tolerability and therapeutic index of LNPs by an order of magnitude from a 1 mg/kg dose to a 10 mg/kg dose in rat. Inclusion of an enzymatically degraded ester linkage can improve the degradation and metabolism profile of the cationic component, while still maintaining the activity of the reLNP formulation. The ester linkage can be internally located within the lipid chain or it may be terminally located at the terminal end of the lipid chain. The internal ester linkage may replace any carbon in the lipid chain.

[0333] In some embodiments, the LNP compositions do not cause an innate immune response that leads to substantial adverse effects at a therapeutic dose level. In some embodiments, the LNP compositions provided herein do not cause toxicity at a therapeutic dose level.

[0334] In some embodiments, the active ingredient (i.e., guide RNAs and/or RGNs, or polynucleotides comprising or encoding such) is formulated as a solid lipid nanoparticle. A solid lipid nanoparticle (SLN) may be spherical with an average diameter between 10 to 1000 nm. SLN possess a solid lipid core matrix that can solubilize lipophilic molecules and may be stabilized with surfactants and/or emulsifiers. In a further embodiment, the lipid nanoparticle may be a self-assembly lipid-polymer nanoparticle (see, e.g., Zhang et al. (2008) ACS Nano 2(8):1696-1702).

[0335] In some embodiments, a lipid-based formulation including an active ingredient (i.e., guide RNAs and/or RGNs, or polynucleotides comprising or encoding such) can be formulated for controlled release and/or targeted delivery. As used herein, “controlled release” refers to a pharmaceutical composition or compound release profile that conforms to a particular pattern of release to effect a therapeutic outcome.

[0336] In some embodiments, a lipid-based formulation including an active ingredient (i.e., guide RNAs and/or RGNs, or polynucleotides comprising or encoding such) includes at least one controlled release coating. Controlled release coatings include: OPADRY® (Colorcon Inc., Harleysville, PA); polyvinylpyrrolidone/vinyl acetate copolymer; polyvinylpyrrolidone; hydroxypropyl methylcellulose; hydroxypropyl cellulose; hydroxyethyl cellulose; EUDRAGIT RL® (Evonik, Essen, Germany); EUDRAGIT RS® (Evonik, Essen, Germany); and cellulose derivatives such as ethylcellulose aqueous dispersions (AQUACOAT® and SURELEASE®, Colorcon Inc., Harleysville, PA). In some embodiments, the controlled release and/or targeted delivery formulation may comprise at least one degradable polyester which may contain polycationic side chains. Degradable polyesters include poly(serine ester), poly(L-lactide-co-L-lysine), poly(4-hydroxy-L-proline ester), and combinations thereof. In some embodiments, the degradable polyesters may include a PEG conjugation to form a PEGylated polymer.

[0337] In some embodiments, LNP formulations may be prepared such that they passively or actively are directed to different cell types in vivo, including hepatocytes, immune cells, tumor cells, endothelial cells, antigen presenting cells, and leukocytes (Akinc et al. (2010) Mol Ther. 18: 1357-1364; Song et al. (2005) Nat Biotechnol. 23:709-717; Judge et al. (2009) J Clin Invest. 119:661-673; Kaufmann et al. (2010) Microvasc Res 80:286-293; Santel et al. (2006) Gene Ther 13:1222-1234; Santel et al. (2006) Gene Ther 13:1360-1370; Gutbier et al. (2010) Pulm Pharmacol. Ther. 23:334-344; Basha et al. (2011) Mol. Ther. 19:2186-2200; Fenske and Cullis (2008) Expert Opin Drug Deliv. 5:25-44; Peer et al. (2008) Science 319:627-630; Peer and Lieberman (2011) Gene Ther. 18:1127-1133; all of which are incorporated herein by reference in their entirety). One example of passive targeting of formulations to liver cells includes the DLin-DMA, DLin-KC2-DMA and MC3-based lipid nanoparticle formulations which have been shown to bind to apolipoprotein E and promote binding and uptake of these formulations into hepatocytes in vivo (Akinc et al. (2010) Mol Ther. 18: 1357-1364).

[0338] LNP formulations can also be selectively targeted through expression of different ligands on their surface such as folate, transferrin, N-acetylgalactosamine (GalNAc), and antibody targeted approaches (Kolhatkar et al. (2011) Curr Drug Discov Technol. 8:197-206; Musacchio and Torchilin (2011) Front Biosci. 16:1388-1412; Yu et al. (2010) Mol Membr Biol. 27:286-298; Patil et al. (2008) Crit Rev Ther Drug Carrier Syst. 25:1-61; Benoit et al. (2011) Biomacromolecules. 12:2708-2714; Zhao et al. (2008) Expert Opin Drug Deliv. 5:309-319; Akinc et al. (2010) Mol Ther. 18: 1357-1364; Srinivasan et al. (2012) Methods Mol Biol. 820:105-116; Ben-Arie et al. (2012) Methods Mol Biol. 757:497-507; Peer, D (2010) J of controlled release 148(1):63-68; Peer et al. (2007) Proc Natl Acad Sci USA. 104:4095-4100; Kim et al. (2011) Methods Mol Biol. 721:339-353; Subramanya et al. (2010) Mol Ther. 18:2028-2037; Song et al. (2005) Nat Biotechnol. 23:709-717; Peer et al. (2008) Science 319:627-630; Peer and Lieberman (2011) Gene Ther. 18:1127-1133; all of which are incorporated herein by reference in their entirety).

[0339] In some embodiments, an active ingredient (i.e., guide RNAs and/or RGNs, or polynucleotides comprising or encoding such) may be encapsulated into an LNP and the LNP may then be encapsulated into a polymer, polymer matrix, hydrogel and/or surgical sealant described herein and/or known in the art. In some embodiments, the polymer, hydrogel or surgical sealant includes: poly(lactic-co-glycolic acid (PLGA); ethylene vinyl acetate (EVAc); poloxamer; GELSITE® (Nanotherapeutics, Inc. Alachua, FL); HYLENEX® (Halozyme Therapeutics, San Diego CA); surgical sealants such as fibrinogen polymers (Ethicon Inc., Cornelia, GA) and TISSELL® (Baxter International, Inc Deerfield, IL); PEG-based sealants; and COSEAL® (Baxter International, Inc Deerfield, IL).

[0340] LNPs and LNP formulations are further described in, e.g., U.S. Pat. Nos. 7,982,027; 7,799,565; 8,058,069; 8,283,333; 7,901,708; 7,745,651; 7,803,397; 8,101,741; 8,188,263; 7,915,399; 8,236,943 and 7,838,658; European Pat. Nos. 1766035; 1519714; 1781593; and 1664316.

[0341] In some embodiments wherein cells comprising or modified with the presently disclosed RGN, gRNAs, RGN systems or polynucleotides encoding the same are administered to a subject, the cells are administered as a suspension with a pharmaceutically acceptable carrier. One of skill in the art will recognize that a pharmaceutically acceptable carrier to be used in a cell composition will not include buffers, compounds, cryopreservation agents, preservatives, or other agents in amounts that substantially interfere with the viability of the cells to be delivered to the subject. A formulation comprising cells can include, for example, osmotic buffers that permit cell membrane integrity to be maintained, and optionally, nutrients to maintain cell viability or enhance engraftment upon administration. Such formulations and suspensions are known to those of skill in the art and/or can be adapted for use with the cells described herein using routine experimentation.

[0342] A cell composition can also be emulsified or presented as a liposome composition, provided that the emulsification procedure does not adversely affect cell viability. The cells and any other active ingredient can be mixed with excipients that are pharmaceutically acceptable and compatible with the active ingredient, and in amounts suitable for use in the therapeutic methods described herein.

[0343] Additional agents included in a cell composition can include pharmaceutically acceptable salts of the components therein. Pharmaceutically acceptable salts include the acid addition salts (formed with the free amino groups of the polypeptide) that are formed with inorganic acids, such as, for example, hydrochloric or phosphoric acids, or such organic acids as acetic, tartaric, mandelic and the like. Salts formed with the free carboxyl groups can also be derived from inorganic bases, such as, for example, sodium, potassium, ammonium, calcium or ferric hydroxides, and such organic bases as isopropylamine, trimethylamine, 2-ethylamino ethanol, histidine, procaine and the like.

[0344] Physiologically tolerable and pharmaceutically acceptable carriers are well known in the art. Exemplary liquid carriers are sterile aqueous solutions that contain no materials in addition to the active ingredients and water, or contain a buffer such as sodium phosphate at physiological pH value, physiological saline or both, such as phosphate-buffered saline. Still further, aqueous carriers can contain more than one buffer salt, as well as salts such as sodium and potassium chlorides, dextrose, polyethylene glycol and other solutes. Liquid compositions can also contain liquid phases in addition to and to the exclusion of water. Exemplary of such additional liquid phases are glycerin, vegetable oils such as cottonseed oil, and water-oil emulsions. The amount of an active compound used in the cell compositions that is effective in the treatment of a particular disorder or condition can depend on the nature of the disorder or condition, and can be determined by standard clinical techniques.

[0345] The presently disclosed RGN polypeptides, guide RNAs, RGN systems or polynucleotides encoding the same can be formulated with pharmaceutically acceptable excipients such as carriers, solvents, stabilizers, adjuvants, diluents, etc., depending upon the particular mode of administration and dosage form. In some embodiments, these pharmaceutical compositions are formulated to achieve a physiologically compatible pH, and range from a pH of about 3 to a pH of about 11, about pH 3 to about pH 7, depending on the formulation and route of administration. In some embodiments, the pH can be adjusted to a range from about pH 5.0 to about pH 8. In some embodiments, the compositions can comprise a therapeutically effective amount of at least one compound as described herein, together with one or more pharmaceutically acceptable excipients. In some embodiments, the compositions comprise a combination of the compounds described herein, or include a second active ingredient useful in the treatment or prevention of bacterial growth (for example and without limitation, anti-bacterial or anti-microbial agents), or include a combination of reagents of the present disclosure.

[0346] Suitable excipients include, for example, carrier molecules that include large, slowly metabolized macromolecules such as proteins, polysaccharides, polylactic acids, polyglycolic acids, polymeric amino acids, amino acid copolymers, and inactive virus particles. Other exemplary excipients can include antioxidants (for example and without limitation, ascorbic acid), chelating agents (for example and without limitation, EDTA), carbohydrates (for example and without limitation, dextrin, hydroxyalkylcellulose, and hydroxyalkylmethylcellulose), stearic acid, liquids (for example and without limitation, oils, water, saline, glycerol and ethanol), wetting or emulsifying agents, pH buffering substances, and the like.

[0347] In some embodiments, the formulations are provided in unit-dose or multi-dose containers, for example sealed ampules and vials, and may be stored in a freeze-dried (lyophilized) condition requiring the addition of the sterile liquid carrier, for example, saline, water-for-injection, a semi-liquid foam, or gel, immediately prior to use. Extemporaneous injection solutions and suspensions may be prepared from sterile powders, granules and tablets of the kind previously described. In some embodiments, the active ingredient is dissolved in a buffered liquid solution that is frozen in a unit-dose or multi-dose container and later thawed for injection or kept/stabilized under refrigeration until use.

[0348] The therapeutic agent(s) may be contained in controlled release systems. In order to prolong the effect of a drug, it often is desirable to slow the absorption of the drug from subcutaneous, intrathecal, or intramuscular injection. This may be accomplished by the use of a liquid suspension of crystalline or amorphous material with poor water solubility. The rate of absorption of the drug then depends upon its rate of dissolution which, in turn, may depend upon crystal size and crystalline form. Alternatively, delayed absorption of a parenterally administered drug form is accomplished by dissolving or suspending the drug in an oil vehicle. In some embodiments, the use of a long-term sustained release implant may be particularly suitable for treatment of chronic conditions. Long-term sustained release implants are well-known to those of ordinary skill in the art.

[0349] Methods of treating a disease in a subject in need thereof are provided herein. The methods comprise administering to a subject in need thereof an effective amount of a presently disclosed RGN polypeptide or active variant or fragment thereof or a polynucleotide encoding the same, a presently disclosed gRNA or a polynucleotide encoding the same, a presently disclosed RGN system, or a cell modified by or comprising any one of these compositions.

[0350] In some embodiments, the treatment comprises in vivo gene editing by administering a presently disclosed RGN polypeptide, gRNA, or RGN system or polynucleotide(s) encoding the same. In some embodiments, the treatment comprises ex vivo gene editing wherein cells are genetically modified ex vivo with a presently disclosed RGN polypeptide, gRNA, or RGN system or polynucleotide(s) encoding the same and then the modified cells are administered to a subject. In some embodiments, the genetically modified cells originate from the subject that is then administered the modified cells, and the transplanted cells are referred to herein as autologous. In some embodiments, the genetically modified cells originate from a different subject (i.e., donor) within the same species as the subject that is administered the modified cells (i.e., recipient), and the transplanted cells are referred to herein as allogeneic. In some examples described herein, the cells can be expanded in culture prior to administration to a subject in need thereof.

[0351] In some embodiments, the disease to be treated with the presently disclosed compositions is one that can be treated with immunotherapy, such as with a chimeric antigen receptor (CAR) T cell. Such diseases include but are not limited to cancer. In some embodiments, the disease to be treated with the presently disclosed compositions is associated with a causal mutation. As used herein, a “causal mutation” refers to a particular nucleotide, nucleotides, or nucleotide sequence in the genome that contributes to the severity or presence of a disease or disorder in a subject. The correction of the causal mutation leads to the improvement of at least one symptom resulting from a disease or disorder. In some embodiments, the causal mutation is adjacent to a PAM site recognized by an RGN disclosed herein. The causal mutation can be corrected with a presently disclosed RGN or a fusion polypeptide comprising a presently disclosed RGN and a base-editing polypeptide (i.e., a base editor). Non-limiting examples of diseases associated with a causal mutation include cystic fibrosis, Hurler syndrome, Friedreich's Ataxia, Huntington's Disease, and sickle cell disease. Additional non-limiting examples of disease-associated genes and mutations are set forth in Table 6 and more are available from McKusick-Nathans Institute of Genetic Medicine, Johns Hopkins University (Baltimore, Md.) and National Center for Biotechnology Information, National Library of Medicine (Bethesda, Md.), available on the World Wide Web.

[0352] In some embodiments, a method of treating a disease in a subject in need thereof comprises creating an induced pluripotent stem cell (iPSC) or isolating a mesenchymal stem cell from the subject, contacting the iPSC or mesenchymal stem cell with any one of the RGN polypeptides, systems, compositions comprising the same, or pharmaceutical compositions disclosed herein in order to genetically modify a target nucleic acid molecule within the cell, differentiating the modified iPSC or the modified mesenchymal stem cell into a genetically-modified mature cell or precursor thereof, and administering the genetically-modified mature cell or precursor thereof into the subject. In some embodiments, the iPSC or the mesenchymal stem cell is an autologous or an allogeneic cell. In some embodiments, the iPSC or the mesenchymal stem cell is derived from a donor that is a perfect human leukocyte antigen (HLA) match for the subject. In some embodiments, the subject is administered a myeloablative therapy prior to administration of the modified cells.

[0353] Any method known in the art for creating patient specific iPS cells can be used, including but not limited to that described in Takahashi and Yamanaka, Cell 126(4):663-76, 2006. For example, the creating step can comprise: a) isolating a somatic cell, such as a skin cell or fibroblast, from the subject; and b) introducing a set of pluripotency-associated genes into the somatic cell in order to induce the cell to become a pluripotent stem cell. The set of pluripotency-associated genes can be one or more of the genes selected from the group consisting of OCT4, SOX1, SOX2, SOX3, SOX15, SOX18, NANOG, KLF1, KLF2, KLF4, KLF5, c-MYC, n-MYC, REM2, TERT and LIN28. Mesenchymal stem cells can be isolated according to any method known in the art, such as from a patient's bone marrow or peripheral blood. For example, marrow aspirate can be collected into a syringe with heparin. Cells can be washed and centrifuged on a Percoll. The cells can be cultured in Dulbecco's modified Eagle's medium (DMEM) (low glucose) containing 10% fetal bovine serum (FBS) (Pittinger M F, Mackay A M, Beck S C et al., Science 1999; 284:143-147).

[0354] Genetically modified cells of the disclosure administered to a subject include autologous and allogeneic cells. Allogeneic cells refer to cells that are from a donor or donors (i.e., an individual or individuals from which the genetically modified cells are derived). Autologous cells refer to cells that are from the subject undergoing treatment (i.e., the recipient of the genetically modified cells). Due to the risk of transplant rejection, an effort is made to optimize the degree of major histocompatibility complex (MHC)/human leukocyte antigen (HLA) matching between donor tissue and recipient. HLA are found on the surface of cells and help the body in identifying self versus non-self, so that the body can attack foreign entities such as bacteria and viruses. HLA typing of donor tissue and the recipient concerns determining the genotype of six HLA antigens or alleles between a donor(s) and recipient to assess the degree to which the six HLA match. HLA alleles usually refer to two each at the loci HLA-A, HLA-B and HLA-DR, or one each at the loci HLA-A, HLA-B and HLA-C and one each at the loci HAL-DRB1, HLA-DQB1 and HLA-DPB1 (see e.g., Kawase et al., 2007, Blood 110:2235-2241). In some embodiments, 4 of 6 HLA matching between donor(s) and recipient are sufficient for administration to the recipient of cells derived from a donor. In some embodiments, 5 of 6 HLA matching between donor(s) and recipient are sufficient for administration to the recipient of cells derived from a donor(s). In some embodiments, 6 of 6 HLA are matched between donor(s) and recipient for administration to the recipient of cells derived from the donor(s). In general, a 4/6, 5/6, or a 6/6 HLA match is the standard of clinical care. When all 6 HLA match between donor(s) and recipient, the match is referred to as being a perfect match.

[0355] As used herein, “treatment” or “treating,” or “palliating” or “ameliorating” are used interchangeably. These terms refer to an approach for obtaining beneficial or desired results including but not limited to a therapeutic benefit and/or a prophylactic benefit. By therapeutic benefit is meant any therapeutically relevant improvement in or effect on one or more diseases, conditions, or symptoms under treatment. For prophylactic benefit, the compositions may be administered to a subject at risk of developing a particular disease, condition, or symptom, or to a subject reporting one or more of the physiological symptoms of a disease, even though the disease, condition, or symptom may not have yet been manifested. In some embodiments, treatment may be administered after one or more symptoms have developed and/or after a disease has been diagnosed. In particular embodiments, treatment may be administered in the absence of symptoms, e.g., to prevent or delay onset of a symptom or inhibit onset or progression of a disease. For example, treatment may be administered to a susceptible individual prior to the onset of symptoms (e.g., in light of a history of symptoms and/or in light of genetic or other susceptibility factors). Treatment may also be continued after symptoms have resolved, for example, to prevent or delay their prevention or recurrence.

[0356] The term “effective amount” or “therapeutically effective amount” refers to the amount of an agent that is sufficient to effect beneficial or desired results. The therapeutically effective amount may vary depending upon one or more of: the subject and disease condition being treated, the weight and age of the subject, the severity of the disease condition, the manner of administration and the like, which can readily be determined by one of ordinary skill in the art. The specific dose may vary depending on one or more of: the particular agent chosen, the dosing regimen to be followed, whether it is administered in combination with other compounds, timing of administration, and the delivery system in which it is carried.

[0357] The term “administering” refers to the placement of an active ingredient into a subject, by a method or route that results in at least partial localization of the introduced active ingredient at a desired site, such as a site of injury or repair, such that a desired effect(s) is produced. In some embodiments, the disclosure provides methods comprising delivering any of the RGN polypeptides, nucleic acid molecules, ribonucleoprotein complexes, vectors, pharmaceutical compositions and/or gRNAs described herein. In some embodiments, the disclosure further provides cells produced by such methods, and organisms (such as animals or plants) comprising or produced from such cells. In some embodiments, a RGN polypeptide and/or nucleic acid molecules as described herein in combination with (and optionally complexed with) a guide sequence is delivered to a cell.

[0358] In those embodiments wherein cells are administered, the cells can be administered by any appropriate route that results in delivery to a desired location in the subject where at least a portion of the implanted cells or components of the cells remain viable. The period of viability of the cells after administration to a subject can be as short as a few hours, e.g., twenty-four hours, to a few days, to as long as several years, or even the lifetime of the patient, i.e., long-term engraftment. For example, in some aspects described herein, an effective amount of photoreceptor cells or retinal progenitor cells is administered via a systemic route of administration, such as an intraperitoneal or intravenous route.

[0359] In some embodiments, the administering comprises administering by viral delivery. Viral vectors comprising a nucleic acid encoding the RGN polypeptides, ribonucleoprotein complexes, or vectors disclosed herein may be administered directly to patients (i.e., in vivo) or they may be used to treat cells in vitro, and the modified cells may optionally be administered to patients (i.e., ex vivo). Conventional viral based systems may include, without limitation, retroviral, lentivirus, adenoviral, adeno-associated and herpes simplex virus vectors for gene transfer. Integration in the host genome is possible with the retrovirus, lentivirus, and adeno-associated virus gene transfer methods, often resulting in long term expression of the inserted transgene. Lentiviral vectors are retroviral vectors that are able to transduce or infect non-dividing cells and typically produce high viral titers. In applications where transient expression is preferred, adenoviral based systems may be used. Adenoviral based vectors are capable of very high transduction efficiency in many cell types and do not require cell division.

[0360] In some embodiments, the administering comprises administering by other non-viral delivery of nucleic acids. Exemplary non-viral delivery methods, without limitation, include RNP complexes, lipofection, nucleofection, microinjection, biolistics, virosomes, liposomes, LNPs, immunoliposomes, polycation or lipidmucleic acid conjugates, naked DNA, artificial virions, and agent-enhanced uptake of DNA. Lipofection is described in e.g., U.S. Pat. Nos. 5,049,386, 4,946,787; and 4,897,355) and lipofection reagents are sold commercially (e.g., Transfectam™ and Lipofectin™). Cationic and neutral lipids that are suitable for efficient receptor-recognition lipofection of polynucleotides include those of Feigner, WO1991/17424; WO 1991/16024. Delivery can be to cells (e.g., in vitro or ex vivo administration) or target tissues (e.g., in vivo administration). In some embodiments, administration of a pharmaceutical composition of the disclosure includes daily intravenous injections of about 1, 2, 3, 4, 5, 6, 7, 8, 9, 10 mg/kg/day, or more of an active ingredient in a pharmaceutical composition comprising a liposome or LNP. In some embodiments, administration of a pharmaceutical composition comprising a liposome or LNP includes doses of about 0.01 to 1 mg per kg of body weight. In some embodiments, administration of a pharmaceutical composition comprising a liposome or LNP includes doses of about 1 to 10 mg per kg of body weight.

[0361] Suitable routes of administering the pharmaceutical compositions described herein include, without limitation: topical, subcutaneous, transdermal, intradermal, intralesional, intraarticular, intraperitoneal, intravesical, transmucosal, gingival, intradental, intracochlear, transtympanic, intraorgan, epidural, intrathecal, intramuscular, intravenous, intravascular, intraosseus, periocular, intratumoral, intracerebral, and intracerebroventricular administration.

[0362] In embodiments, the pharmaceutical composition described herein is administered to a subject by injection, inhalation (e.g., of an aerosol), by means of a catheter, by means of a suppository, or by means of an implant, the implant being of a porous, non-porous, or gelatinous material, including a membrane, such as a sialastic membrane, or a fiber. In embodiments, the pharmaceutical composition is formulated for delivery to a subject, e.g., for gene editing.

[0363] In embodiments, the pharmaceutical composition is formulated in accordance with routine procedures as a composition adapted for intravenous or subcutaneous administration to a subject, e.g., a human. In embodiments, pharmaceutical composition for administration by injection are solutions in sterile isotonic aqueous buffer. Where necessary, the pharmaceutical can also include a solubilizing agent and a local anesthetic such as lignocaine to ease pain at the site of the injection. Generally, the ingredients are supplied either separately or mixed together, for example, as a dry lyophilized powder or water free concentrate in a hermetically sealed container such as an ampoule or sachette indicating the quantity of active agent. Where the pharmaceutical is to be administered by infusion, it can be dispensed with an infusion bottle containing sterile pharmaceutical grade water or saline. Where the pharmaceutical composition is administered by injection, an ampoule of sterile water for injection or saline can be provided so that the ingredients can be mixed prior to administration.

[0364] In embodiments, the pharmaceutical composition can be contained within a lipid particle or vesicle, such as a liposome or microcrystal, which is also suitable for parenteral administration.

[0365] Although the descriptions of pharmaceutical compositions provided herein are principally directed to pharmaceutical compositions which are suitable for administration to humans, it will be understood by the skilled artisan that such compositions are generally suitable for administration to animals or organisms of all sorts.

[0366] As used herein, the term “subject” refers to any individual for whom diagnosis, treatment or therapy is desired. In some embodiments, the subject is an animal. In some embodiments, the subject is a mammal. In some embodiments, the subject is a human being.

[0367] The efficacy of a treatment can be determined by the skilled clinician. However, a treatment is considered an “effective treatment,” if any one or all of the signs or symptoms of a disease or disorder are altered in a beneficial manner (e.g., decreased by at least 10%), or other clinically accepted symptoms or markers of disease are improved or ameliorated. Efficacy can also be measured by failure of an individual to worsen as assessed by hospitalization or need for medical interventions (e.g., progression of the disease is halted or at least slowed). Methods of measuring these indicators are known to those of skill in the art. Treatment includes: (1) inhibiting the disease, e.g., arresting, or slowing the progression of symptoms; or (2) relieving the disease, e.g., causing regression of symptoms; and (3) preventing or reducing the likelihood of the development of symptoms.

### A. Modifying Causal Mutations Using Base-Editing

[0368] An example of a genetically inherited disease which could be corrected using an approach that relies on an RGN-base editor fusion protein of the invention is Hurler Syndrome. Hurler Syndrome, also known as MPS-1, is the result of a deficiency of α-L-iduronidase (IDUA) resulting in a lysosomal storage disease characterized at the molecular level by the accumulation of dermatan sulfate and heparan sulfate in lysosomes. This disease is generally an inherited genetic disorder caused by mutations in the IDUA gene encoding α-L-iduronidase. Common IDUA mutations are W402X and Q70X, both nonsense mutations resulting in premature termination of translation. Such mutations are well addressed by precise genome editing (PGE) approaches, since reversion of a single nucleotide, for example by a base-editing approach, would restore the wild-type coding sequence and result in protein expression controlled by the endogenous regulatory mechanisms of the genetic locus. Additionally, since heterozygotes are known to be asymptomatic, a PGE therapy that targets one of these mutations would be useful to a large proportion of patients with this disease, as only one of the mutated alleles needs to be corrected (Bunge et al. (1994) Hum. Mol. Genet. 3(6): 861-866, herein incorporated by reference).

[0369] Current treatments for Hurler Syndrome include enzyme replacement therapy and bone marrow transplants (Vellodi et al. (1997) Arch. Dis. Child. 76(2): 92-99; Peters et al. (1998) Blood 91(7): 2601-2608, herein incorporated by reference). While enzyme replacement therapy has had a dramatic effect on the survival and quality of life of Hurler Syndrome patients, this approach requires costly and time-consuming weekly infusions. Additional approaches include the delivery of the IDUA gene on an expression vector or the insertion of the gene into a highly expressed locus such as that of serum albumin (U.S. Pat. No. 9,956,247, herein incorporated by reference). However, these approaches do not restore the original IDUA locus to the correct coding sequence. A genome-editing strategy would have a number of advantages, most notably that regulation of gene expression would be controlled by the natural mechanisms present in healthy individuals. Additionally, using base editing does not necessitate causing a double-stranded DNA breaks, which could lead to large chromosomal rearrangements, cell death, or oncogenicity by the disruption of tumor suppression mechanisms. A general strategy may be directed toward using RGN-base editor fusion proteins of the invention, for example those comprising LPG10165, LPG10167, LPG10168, LPG10171, LPG10186, LPG10190, LPG10194, LPG10195, LPG10200, LPG10203, or LPG10207 to target and correct certain disease-causing mutations in the human genome. It will be appreciated that similar approaches to target diseases that can be corrected by base-editing may also be pursued. It will be further appreciated that similar approaches to target disease-causing mutations in other species, particularly common household pets or livestock, can also be deployed using the RGNs of the invention. Common household pets and livestock include dogs, cats, horses, pigs, cows, sheep, chickens, donkeys, snakes, ferrets, and fish including salmon and shrimp.

### B. Modifying Causal Mutations by Targeted Deletion

[0370] RGNs of the invention could also be useful in human therapeutic approaches where the causal mutation is more complicated. For example, some diseases such as Friedreich's Ataxia and Huntington's Disease are the result of a significant increase in repeats of a three nucleotide motif (i.e., an expanded trinucleotide repeat”) at a particular region of a gene, which affects the ability of the expressed protein to function or to be expressed. Friedreich's Ataxia (FRDA) is an autosomal recessive disease resulting in progressive degeneration of nervous tissue in the spinal cord. Reduced levels of the frataxin (FXN) protein in the mitochondria cause oxidative damages and iron deficiencies at the cellular level. The reduced FXN expression has been linked to a GAA triplet expansion within the intron 1 of the somatic and germline FXN gene. In FRDA patients, the GAA repeat frequently consists of more than 70, sometimes even more than 1000 (most commonly 600-900) triplets, whereas unaffected individuals have about 40 repeats or less (Pandolfo et al. (2012) Handbook of Clinical Neurology 103: 275-294; Campuzano et al. (1996) Science 271: 1423-1427; Pandolfo (2002) Adv. Exp. Med. Biol. 516: 99-118; all herein incorporated by reference).

[0371] The expansion of the trinucleotide repeat sequence causing Friedreich's Ataxia (FRDA) occurs in a defined genetic locus within the FXN gene, referred to as the FRDA instability region. RNA guided nucleases (RGNs) may be used for excising the expanded trinucleotide repeat in FRDA patient cells. This approach requires 1) an RGN and guide RNA sequence that can be programmed to target the allele in the human genome; and 2) a delivery approach for the RGN and guide sequence. Many nucleases used for genome editing, such as the commonly used Cas9 nuclease from S. pyogenes (SpCas9), are too large to be packaged into adeno-associated viral (AAV) vectors, especially when considering the length of the SpCas9 gene and the guide RNA in addition to other genetic elements required for functional expression cassettes. This makes an approach using SpCas9 more difficult.

[0372] Certain RNA guided nucleases of the invention, for example, LPG10165, LPG10166, LPG10167, LPG10168, LPG10169, LPG10171, LPG10186, LPG10190, LPG10191, LPG10194, LPG10195, LPG10196, LPG10197, LPG10198, LPG10200, LPG10203, LPG10204, LPG10205, LPG10207, and LPG10208, are well suited for packaging into an AAV vector along with a guide RNA. The present invention encompasses a strategy using RGNs of the invention in which an expanded trinucleotide repeat is removed. Such a strategy is applicable to other diseases and disorders which have a similar genetic basis, such as Huntington's Disease. Similar strategies using RGNs of the invention may also be applicable to similar diseases and disorders in non-human animals of agronomic or economic importance, including dogs, cats, horses, pigs, cows, sheep, chickens, donkeys, snakes, ferrets, and fish including salmon and shrimp.

### C. Modifying Causal Mutations by Targeted Mutagenesis

[0373] RGNs of the invention could also be to introduce disruptive mutations that may result in a beneficial effect. Genetic defects in the genes encoding hemoglobin, particularly the beta globin chain (the HBB gene), can be responsible for a number of diseases known as hemoglobinopathies, including sickle cell anemia and thalassemias.

[0374] In adult humans, hemoglobin is a heterotetramer comprising two alpha (α)-like globin chains and two beta (β)-like globin chains and 4 heme groups. In adults the α202 tetramer is referred to as Hemoglobin A (HbA) or adult hemoglobin. Typically, the alpha and beta globin chains are synthesized in an approximate 1:1 ratio and this ratio seems to be critical in terms of hemoglobin and red blood cell (RBC) stabilization. In a developing fetus, a different form of hemoglobin, fetal hemoglobin (HbF), is produced which has a higher binding affinity for oxygen than Hemoglobin A such that oxygen can be delivered to the baby's system via the mother's blood stream. Fetal hemoglobin also contains two α globin chains, but in place of the adult β-globin chains, it has two fetal gamma (γ)-globin chains (i.e., fetal hemoglobin is α2γ2). The regulation of the switch from production of gamma- to beta-globin is quite complex, and primarily involves a down-regulation of gamma globin transcription with a simultaneous up-regulation of beta globin transcription. At approximately 30 weeks of gestation, the synthesis of gamma globin in the fetus starts to drop while the production of beta globin increases. By approximately 10 months of age, the newborn's hemoglobin is nearly all α2β2 although some HbF persists into adulthood (approximately 1-3% of total hemoglobin). In the majority of patients with hemoglobinopathies, the genes encoding gamma globin remain present, but expression is relatively low due to normal gene repression occurring around parturition as described above.

[0375] Sickle cell disease is caused by a V6E mutation in the β globin gene (HBB) (a GAG to GTG at the DNA level), where the resultant hemoglobin is referred to as “hemoglobinS” or “HbS.” Under lower oxygen conditions, HbS molecules aggregate and form fibrous precipitates. These aggregates cause the abnormality or ‘sickling’ of the RBCs, resulting in a loss of flexibility of the cells. The sickling RBCs are no longer able to squeeze into the capillary beds and can result in vaso-occlusive crisis in sickle cell patients. In addition, sickled RBCs are more fragile than normal RBCs, and tend towards hemolysis, eventually leading to anemia in the patient.

[0376] Treatment and management of sickle cell patients is a life-long proposition involving antibiotic treatment, pain management and transfusions during acute episodes. One approach is the use of hydroxyurea, which exerts its effects in part by increasing the production of gamma globin. Long term side effects of chronic hydroxyurea therapy are still unknown, however, and treatment gives unwanted side effects and can have variable efficacy from patient to patient. Despite an increase in the efficacy of sickle cell treatments, the life expectancy of patients is still only in the mid to late 50's and the associated morbidities of the disease have a profound impact on a patient's quality of life.

[0377] Thalassemias (alpha thalassemias and beta thalassemia) are also diseases relating to hemoglobin and typically involve a reduced expression of globin chains. This can occur through mutations in the regulatory regions of the genes or from a mutation in a globin coding sequence that results in reduced expression or reduced levels or functional globin protein. Treatment of thalassemias usually involves blood transfusions and iron chelation therapy. Bone marrow transplants are also being used for treatment of people with severe thalassemias if an appropriate donor can be identified, but this procedure can have significant risks.

[0378] One approach that has been proposed for the treatment of both sickle cell disease (SCD) and beta thalassemias is to increase the expression of gamma globin so that HbF functionally replaces the aberrant adult hemoglobin. As mentioned above, treatment of SCD patients with hydroxyurea is thought to be successful in part due to its effect on increasing gamma globin expression (DeSimone (1982) Proc Nat'l Acad Sci USA 79(14):4428-31; Ley, et al., (1982) N. Engl. J. Medicine, 307: 1469-1475; Ley, et al., (1983) Blood 62: 370-380; Constantoulakis et al., (1988) Blood 72(6):1961-1967, all herein incorporated by reference). Increasing the expression of HbF involves identification of genes whose products play a role in the regulation of gamma globin expression. One such gene is BCL11A. BCL11A encodes a zinc finger protein that expressed in adult erythroid precursor cells, and down-regulation of its expression leads to an increase in gamma globin expression (Sankaran et at (2008) Science 322: 1839, herein incorporated by reference). Use of an inhibitory RNA targeted to the BCL11A gene has been proposed (e.g., U.S. Patent Publication 2011/0182867, herein incorporated by reference) but this technology has several potential drawbacks, including that complete knock down may not be achieved, delivery of such RNAs may be problematic, and the RNAs must be present continuously, requiring multiple treatments for life.

[0379] RGNs of the invention, for example LPG10165, LPG10166, LPG10167, LPG10168, LPG10169, LPG10171, LPG10186, LPG10190, LPG10191, LPG10194, LPG10195, LPG10196, LPG10197, LPG10198, LPG10200, LPG10203, LPG10204, LPG10205, LPG10207, or LPG10208 may be used to target the BCL11 A enhancer region to disrupt expression of BCL11 A, thereby increasing gamma globin expression. This targeted disruption can be achieved by non-homologous end joining (NHEJ), whereby an RGN of the invention targets to a particular sequence within the BCL11A enhancer region, makes a double-stranded break, and the cell's machinery repairs the break, typically simultaneously introducing deleterious mutations. Similar to what is described for other disease targets, RGNs of the invention may have advantages over other known RGNs due to their relatively small size, which enables packaging expression cassettes for the RGN and its guide RNA into a single AAV vector for in vivo delivery. Similar strategies using RGNs of the invention may also be applicable to similar diseases and disorders in both humans and in non-human animals of agronomic or economic importance.

### XI. Cells Comprising a Polynucleotide Genetic Modification

[0380] Provided herein are cells and organisms comprising a target nucleic acid molecule that has been modified using a process mediated by an RGN, crRNA, and/or tracrRNA as described herein. In some of these embodiments, the RGN comprises any one of the amino acid sequences set forth as SEQ ID NOs: 1-20, or an active variant or fragment thereof. In various embodiments, the guide RNA comprises a CRISPR repeat comprising any one of the nucleotide sequences set forth as SEQ ID NOs: 21-41, or nucleotides 1-17 of SEQ ID NO: 1041 or 1042, or nucleotides 1-22 of SEQ ID NO: 1044 or 1045, or an active variant or fragment thereof. In particular embodiments, the guide RNA comprises a tracrRNA comprising any one of the nucleotide sequences set forth as SEQ ID NOs:42-62, nucleotides 19-111 of SEQ ID NO: 1040, nucleotides 22-85 of SEQ ID NO: 1041 or 1042, nucleotides 24-138 of SEQ ID NO: 143, nucleotides 27-96 of SEQ ID NO: 1044, or nucleotides 27-95 of SEQ ID NO: 1045, or an active variant or fragment thereof. The guide RNA of the system can be a single guide RNA or a dual-guide RNA.

[0381] The modified cells can be eukaryotic (e.g., mammalian, plant, insect, avian cell) or prokaryotic. Also provided are organelles and embryos comprising at least one nucleotide sequence that has been modified by a process utilizing an RGN, crRNA, and/or tracrRNA as described herein. The genetically modified cells, organisms, organelles, and embryos can be heterozygous or homozygous for the modified nucleotide sequence.

[0382] The chromosomal modification of the cell, organism, organelle, or embryo can result in altered expression (up-regulation or down-regulation), inactivation, or the expression of an altered protein product or an integrated sequence. In those embodiments wherein the chromosomal modification results in either the inactivation of a gene or the expression of a non-functional protein product, the genetically modified cell, organism, organelle, or embryo is referred to as a “knock out”. The knock out phenotype can be the result of a deletion mutation (i.e., deletion of at least one nucleotide), an insertion mutation (i.e., insertion of at least one nucleotide), or a nonsense mutation (i.e., substitution of at least one nucleotide such that a stop codon is introduced).

[0383] Alternatively, the chromosomal modification of a cell, organism, organelle, or embryo can produce a “knock in”, which results from the chromosomal integration of a nucleotide sequence that encodes a protein. In some of these embodiments, the coding sequence is integrated into the chromosome such that the chromosomal sequence encoding the wild-type protein is inactivated, but the exogenously introduced protein is expressed.

[0384] In other embodiments, the chromosomal modification results in the production of a variant protein product. The expressed variant protein product can have at least one amino acid substitution and/or the addition or deletion of at least one amino acid. The variant protein product encoded by the altered chromosomal sequence can exhibit modified characteristics or activities when compared to the wild-type protein, including but not limited to altered enzymatic activity or substrate specificity.

[0385] In yet other embodiments, the chromosomal modification can result in an altered expression pattern of a protein. As a non-limiting example, chromosomal alterations in the regulatory regions controlling the expression of a protein product can result in the overexpression or downregulation of the protein product or an altered tissue or temporal expression pattern.

[0386] The cells that have been modified can be grown into an organism, such as a plant, in accordance with conventional ways. See, for example, McCormick et al. (1986) Plant Cell Reports 5:81-84. These plants may then be grown, and either pollinated with the same modified strain or different strains, and the resulting hybrid having the genetic modification. The present invention provides genetically modified seed. Progeny, variants, and mutants of the regenerated plants are also included within the scope of the invention, provided that these parts comprise the genetic modification. Further provided is a processed plant product or byproduct that retains the genetic modification, including for example, soymeal.

[0387] The methods provided herein may be used for modification of any plant species, including, but not limited to, monocots and dicots. Examples of plants of interest include, but are not limited to, corn (maize), sorghum, wheat, sunflower, tomato, crucifers, peppers, potato, cotton, rice, soybean, sugarbeet, sugarcane, tobacco, barley, and oilseed rape, Brassica sp., alfalfa, rye, millet, safflower, peanuts, sweet potato, cassava, coffee, coconut, pineapple, citrus trees, cocoa, tea, banana, avocado, fig, guava, mango, olive, papaya, cashew, macadamia, almond, oats, vegetables, ornamentals, and conifers.

[0388] Vegetables include, but are not limited to, tomatoes, lettuce, green beans, lima beans, peas, and members of the genus Curcumas such as cucumber, cantaloupe, and musk melon. Ornamentals include, but are not limited to, azalea, hydrangea, hibiscus, roses, tulips, daffodils, petunias, carnation, poinsettia, and chrysanthemum. In specific embodiments, plants of the present invention are crop plants (for example, maize, sorghum, wheat, sunflower, tomato, crucifers, peppers, potato, cotton, rice, soybean, sugarbeet, sugarcane, tobacco, barley, oilseed rape, etc.).

[0389] The methods provided herein can also be used to genetically modify any prokaryotic species, including but not limited to, archaea and bacteria (e.g., Bacillus sp., Klebsiella sp. Streptomyces sp., Rhizobium sp., Escherichia sp., Pseudomonas sp., Salmonella sp., Shigella sp., Vibrio sp., Yersinia sp., Mycoplasma sp., Agrobacterium, Lactobacillus sp.).

[0390] The methods provided herein can be used to genetically modify any eukaryotic species or cells therefrom, including but not limited to animals (e.g., mammals, insects, fish, birds, and reptiles), fungi, amoeba, algae, and yeast. In some embodiments, the cell that is modified by the presently disclosed methods include cells of hematopoietic origin, such as cells of the immune system including but not limited to B cells, T cells, natural killer (NK) cells, pluripotent stem cells, induced pluripotent stem cells, chimeric antigen receptor T (CAR-T) cells, monocytes, macrophages, and dendritic cells.

[0391] Cells that have been modified may be introduced into an organism. These cells could have originated from the same organism (e.g., person) in the case of autologous cellular transplants, wherein the cells are modified in an ex vivo approach. Alternatively, the cells originated from another organism within the same species (e.g., another person) in the case of allogeneic cellular transplants.

[0392] The article “a” and “an” are used herein to refer to one or more than one (i.e., to at least one) of the grammatical object of the article. By way of example, “a polypeptide” means one or more polypeptides.

[0393] All publications and patent applications mentioned in the specification are indicative of the level of those skilled in the art to which this disclosure pertains. All publications and patent applications are herein incorporated by reference to the same extent as if each individual publication or patent application was specifically and individually indicated to be incorporated by reference.

[0394] Although the foregoing invention has been described in some detail by way of illustration and example for purposes of clarity of understanding, it will be obvious that certain changes and modifications may be practiced within the scope of the appended embodiments.

Non-limiting embodiments include:

[0395] 1. A nucleic acid molecule comprising a polynucleotide encoding an RNA-guided nuclease (RGN) polypeptide, wherein said polynucleotide comprises a nucleotide sequence encoding an RGN polypeptide comprising an amino acid sequence having at least 90% sequence identity to any one of SEQ ID NOs:1-20.

[0396] 2. The nucleic acid molecule of embodiment 1, wherein said RGN polypeptide is capable of binding a target sequence in a target nucleic acid molecule, wherein said target sequence comprises a target strand and a non-target strand, in an RNA-guided sequence specific manner when bound to a guide RNA (gRNA) capable of hybridizing to the non-target strand of the target sequence.

[0397] 3. The nucleic acid molecule of embodiment 1 or 2, wherein said polynucleotide encoding an RGN polypeptide is operably linked to a promoter heterologous to said polynucleotide.

[0398] 4. The nucleic acid molecule of any one of embodiments 1-3, wherein said RGN polypeptide comprises an amino acid sequence having at least 95% sequence identity to any one of SEQ ID NOs:1-20.

[0399] 5. The nucleic acid molecule of any one of embodiments 1-3, wherein said RGN polypeptide comprises an amino acid sequence having 100% sequence identity to any one of SEQ ID NOs: 1-20.

[0400] 6. The nucleic acid molecule of any one of embodiments 1-5, wherein said RGN polypeptide is capable of cleaving said target nucleic acid molecule upon binding.

[0401] 7. The nucleic acid molecule of embodiment 6, wherein said RGN polypeptide is capable of generating a double-stranded break.

[0402] 8. The nucleic acid molecule of embodiment 6, wherein said RGN polypeptide is capable of generating a single-stranded break.

[0403] 9. The nucleic acid molecule of any one of embodiments 1-5, wherein said RGN polypeptide is nuclease inactive or is a nickase.

[0404] 10. The nucleic acid molecule of any one of embodiments 1-9, wherein the RGN polypeptide is operably fused to a base-editing polypeptide.

[0405] 11. The nucleic acid molecule of embodiment 10, wherein the base-editing polypeptide is a deaminase.

[0406] 12. The nucleic acid molecule of embodiment 11, wherein the deaminase is a cytosine deaminase or an adenine deaminase.

[0407] 13. The nucleic acid molecule of embodiment 11, wherein the deaminase has at least 90% sequence identity to an amino acid sequence of any one of SEQ ID NOs: 481-552.

[0408] 14. The nucleic acid molecule of embodiment 11, wherein the deaminase has 100% sequence identity to an amino acid sequence of any one of SEQ ID NOs: 481-552.

[0409] 15. The nucleic acid molecule of any one of embodiments 1-14, wherein the RGN polypeptide comprises one or more nuclear localization signals.

[0410] 16. The nucleic acid molecule of any one of embodiments 1-15, wherein the RGN polypeptide is codon optimized for expression in a eukaryotic cell.

[0411] 17. The nucleic acid molecule of any one of embodiments 1-16, wherein said target sequence is located adjacent to a protospacer adjacent motif (PAM).

[0412] 18. A vector comprising the nucleic acid molecule of any one of embodiments 1-17.

[0413] 19. The vector of embodiment 18, further comprising at least one nucleotide sequence encoding said gRNA capable of hybridizing to the non-target strand of said target sequence.

[0414] 20. The vector of embodiment 19, wherein the guide RNA is selected from the group consisting of:
[0415] a) a guide RNA comprising:
   [0416] i) a CRISPR RNA comprising a CRISPR repeat sequence having at least 90% sequence identity to SEQ ID NO: 21; and
   [0417] ii) a tracrRNA having at least 90% sequence identity to SEQ ID NO: 42;
   [0418] wherein said RGN polypeptide comprises an amino acid sequence having at least 90% sequence identity to SEQ ID NO: 1;
[0419] b) a guide RNA comprising:
   [0420] i) a CRISPR RNA comprising a CRISPR repeat sequence having at least 90% sequence identity to SEQ ID NO: 22; and
   [0421] ii) a tracrRNA having at least 90% sequence identity to SEQ ID NO: 43;
   [0422] wherein said RGN polypeptide comprises an amino acid sequence having at least 90% sequence identity to SEQ ID NO: 2;
[0423] c) a guide RNA comprising:
   [0424] i) a CRISPR RNA comprising a CRISPR repeat sequence having at least 90% sequence identity to SEQ ID NO: 23; and
   [0425] ii) a tracrRNA having at least 90% sequence identity to SEQ ID NO: 44 or nucleotides 19-111 of SEQ ID NO: 1040;
   [0426] wherein said RGN polypeptide comprises an amino acid sequence having at least 90% sequence identity to SEQ ID NO: 3;
[0427] d) a guide RNA comprising:
   [0428] i) a CRISPR RNA comprising a CRISPR repeat sequence having at least 90% sequence identity to SEQ ID NO: 24; and
   [0429] ii) a tracrRNA having at least 90% sequence identity to SEQ ID NO: 45;
   [0430] wherein said RGN polypeptide comprises an amino acid sequence having at least 90% sequence identity to SEQ ID NO: 4;
[0431] e) a guide RNA comprising:
   [0432] i) a CRISPR RNA comprising a CRISPR repeat sequence having at least 90% sequence identity to SEQ ID NO: 25 or nucleotides 1-17 of SEQ ID NO: 1041 or 1042; and
   [0433] ii) a tracrRNA having at least 90% sequence identity to SEQ ID NO: 46 or nucleotides 22-85 of SEQ ID NO: 1041 or 1042;
   [0434] wherein said RGN polypeptide comprises an amino acid sequence having at least 90% sequence identity to SEQ ID NO: 5;
[0435] f) a guide RNA comprising:
   [0436] i) a CRISPR RNA comprising a CRISPR repeat sequence having at least 90% sequence identity to SEQ ID NO: 26; and
   [0437] ii) a tracrRNA having at least 90% sequence identity to SEQ ID NO: 47 or nucleotides 24-138 of SEQ ID NO: 1043;
   [0438] wherein said RGN polypeptide comprises an amino acid sequence having at least 90% sequence identity to SEQ ID NO: 6;
[0439] g) a guide RNA comprising:
   [0440] i) a CRISPR RNA comprising a CRISPR repeat sequence having at least 90% sequence identity to SEQ ID NO: 27 or nucleotides 1-22 of SEQ ID NO: 1044 or 1045; and
   [0441] ii) a tracrRNA having at least 90% sequence identity to SEQ ID NO: 48 or nucleotides 27-96 of SEQ ID NO 1044 or nucleotides 27-95 of SEQ ID NO: 1045;
   [0442] wherein said RGN polypeptide comprises an amino acid sequence having at least 90% sequence identity to SEQ ID NO: 7;
[0443] h) a guide RNA comprising:
   [0444] i) a CRISPR RNA comprising a CRISPR repeat sequence having at least 90% sequence identity to SEQ ID NO: 28; and
   [0445] ii) a tracrRNA having at least 90% sequence identity to SEQ ID NO: 49;
   [0446] wherein said RGN polypeptide comprises an amino acid sequence having at least 90% sequence identity to SEQ ID NO: 8;
[0447] i) a guide RNA comprising:
   [0448] i) a CRISPR RNA comprising a CRISPR repeat sequence having at least 90% sequence identity to SEQ ID NO: 29; and
   [0449] ii) a tracrRNA having at least 90% sequence identity to SEQ ID NO: 50;
   [0450] wherein said RGN polypeptide comprises an amino acid sequence having at least 90% sequence identity to SEQ ID NO: 9;
[0451] j) a guide RNA comprising:
   [0452] i) a CRISPR RNA comprising a CRISPR repeat sequence having at least 90% sequence identity to SEQ ID NO: 30; and
   [0453] ii) a tracrRNA having at least 90% sequence identity to SEQ ID NO: 51;
   [0454] wherein said RGN polypeptide comprises an amino acid sequence having at least 90% sequence identity to SEQ ID NO: 10;
[0455] k) a guide RNA comprising:
   [0456] i) a CRISPR RNA comprising a CRISPR repeat sequence having at least 90% sequence identity to SEQ ID NO: 31; and
   [0457] ii) a tracrRNA having at least 90% sequence identity to SEQ ID NO: 52;
   [0458] wherein said RGN polypeptide comprises an amino acid sequence having at least 90% sequence identity to SEQ ID NO: 11;
[0459] l) a guide RNA comprising:
   [0460] i) a CRISPR RNA comprising a CRISPR repeat sequence having at least 90% sequence identity to SEQ ID NO: 32; and
   [0461] ii) a tracrRNA having at least 90% sequence identity to SEQ ID NO: 53;
   [0462] wherein said RGN polypeptide comprises an amino acid sequence having at least 90% sequence identity to SEQ ID NO: 12;
[0463] m) a guide RNA comprising:
   [0464] i) a CRISPR RNA comprising a CRISPR repeat sequence having at least 90% sequence identity to SEQ ID NO: 33; and
   [0465] ii) a tracrRNA having at least 90% sequence identity to SEQ ID NO: 54;
   [0466] wherein said RGN polypeptide comprises an amino acid sequence having at least 90% sequence identity to SEQ ID NO: 13;
[0467] n) a guide RNA comprising:
   [0468] i) a CRISPR RNA comprising a CRISPR repeat sequence having at least 90% sequence identity to SEQ ID NO: 34; and
   [0469] ii) a tracrRNA having at least 90% sequence identity to SEQ ID NO: 55;
   [0470] wherein said RGN polypeptide comprises an amino acid sequence having at least 90% sequence identity to SEQ ID NO: 14;
[0471] o) a guide RNA comprising:
   [0472] i) a CRISPR RNA comprising a CRISPR repeat sequence having at least 90% sequence identity to SEQ ID NO: 35; and
   [0473] ii) a tracrRNA having at least 90% sequence identity to SEQ ID NO: 56;
   [0474] wherein said RGN polypeptide comprises an amino acid sequence having at least 90% sequence identity to SEQ ID NO: 15;
[0475] p) a guide RNA comprising:
   [0476] i) a CRISPR RNA comprising a CRISPR repeat sequence having at least 90% sequence identity to SEQ ID NO: 36; and
   [0477] ii) a tracrRNA having at least 90% sequence identity to SEQ ID NO: 57;
   [0478] wherein said RGN polypeptide comprises an amino acid sequence having at least 90% sequence identity to SEQ ID NO: 16;
[0479] q) a guide RNA comprising:
   [0480] i) a CRISPR RNA comprising a CRISPR repeat sequence having at least 90% sequence identity to SEQ ID NO: 37; and
   [0481] ii) a tracrRNA having at least 90% sequence identity to SEQ ID NO: 58;
   [0482] wherein said RGN polypeptide comprises an amino acid sequence having at least 90% sequence identity to SEQ ID NO: 17;
[0483] r) a guide RNA comprising:
   [0484] i) a CRISPR RNA comprising a CRISPR repeat sequence having at least 90% sequence identity to SEQ ID NO: 38 or 39; and
   [0485] ii) a tracrRNA having at least 90% sequence identity to SEQ ID NO: 59 or 60;
   [0486] wherein said RGN polypeptide comprises an amino acid sequence having at least 90% sequence identity to SEQ ID NO: 18;
[0487] s) a guide RNA comprising:
   [0488] i) a CRISPR RNA comprising a CRISPR repeat sequence having at least 90% sequence identity to SEQ ID NO: 40; and
   [0489] ii) a tracrRNA having at least 90% sequence identity to SEQ ID NO: 61;
   [0490] wherein said RGN polypeptide comprises an amino acid sequence having at least 90% sequence identity to SEQ ID NO: 19; and
[0491] t) a guide RNA comprising:
   [0492] i) a CRISPR RNA comprising a CRISPR repeat sequence having at least 90% sequence identity to SEQ ID NO: 41; and
   [0493] ii) a tracrRNA having at least 90% sequence identity to SEQ ID NO: 62;
   [0494] wherein said RGN polypeptide comprises an amino acid sequence having at least 90% sequence identity to SEQ ID NO: 20.

[0495] 21. The vector of embodiment 19, wherein the guide RNA is selected from the group consisting of:
[0496] a) a guide RNA comprising:
   [0497] i) a CRISPR RNA comprising a CRISPR repeat sequence having at least 95% sequence identity to SEQ ID NO: 21; and
   [0498] ii) a tracrRNA having at least 95% sequence identity to SEQ ID NO: 42;
   [0499] wherein said RGN polypeptide comprises an amino acid sequence having at least 95% sequence identity to SEQ ID NO: 1;
[0500] b) a guide RNA comprising:
   [0501] i) a CRISPR RNA comprising a CRISPR repeat sequence having at least 95% sequence identity to SEQ ID NO: 22; and
   [0502] ii) a tracrRNA having at least 95% sequence identity to SEQ ID NO: 43;
   [0503] wherein said RGN polypeptide comprises an amino acid sequence having at least 95% sequence identity to SEQ ID NO: 2;
[0504] c) a guide RNA comprising:
   [0505] i) a CRISPR RNA comprising a CRISPR repeat sequence having at least 95% sequence identity to SEQ ID NO: 23; and
   [0506] ii) a tracrRNA having at least 95% sequence identity to SEQ ID NO: 44 or nucleotides 19-111 of SEQ ID NO: 1040;
   [0507] wherein said RGN polypeptide comprises an amino acid sequence having at least 95% sequence identity to SEQ ID NO: 3;
[0508] d) a guide RNA comprising:
   [0509] i) a CRISPR RNA comprising a CRISPR repeat sequence having at least 95% sequence identity to SEQ ID NO: 24; and
   [0510] ii) a tracrRNA having at least 95% sequence identity to SEQ ID NO: 45;
   [0511] wherein said RGN polypeptide comprises an amino acid sequence having at least 95% sequence identity to SEQ ID NO: 4;
[0512] e) a guide RNA comprising:
   [0513] i) a CRISPR RNA comprising a CRISPR repeat sequence having at least 95% sequence identity to SEQ ID NO: 25 or nucleotides 1-17 of SEQ ID NO: 1041 or 1042; and ii) a tracrRNA having at least 95% sequence identity to SEQ ID NO: 46 or nucleotides 22-85 of SEQ ID NO: 1041 or 1042;
   [0514] wherein said RGN polypeptide comprises an amino acid sequence having at least 95% sequence identity to SEQ ID NO: 5;
[0515] f) a guide RNA comprising:
   [0516] i) a CRISPR RNA comprising a CRISPR repeat sequence having at least 95% sequence identity to SEQ ID NO: 26; and
   [0517] ii) a tracrRNA having at least 95% sequence identity to SEQ ID NO: 47 or nucleotides 24-138 of SEQ ID NO: 1043;
   [0518] wherein said RGN polypeptide comprises an amino acid sequence having at least 95% sequence identity to SEQ ID NO: 6;
[0519] g) a guide RNA comprising:
   [0520] i) a CRISPR RNA comprising a CRISPR repeat sequence having at least 95% sequence identity to SEQ ID NO: 27 or nucleotides 1-22 of SEQ ID NO: 1044 or 1045; and ii) a tracrRNA having at least 95% sequence identity to SEQ ID NO: 48 or nucleotides 27-96 of SEQ ID NO: 1044 or nucleotides 27-95 of SEQ ID NO: 1045;
   [0521] wherein said RGN polypeptide comprises an amino acid sequence having at least 95% sequence identity to SEQ ID NO: 7;
[0522] h) a guide RNA comprising:
   [0523] i) a CRISPR RNA comprising a CRISPR repeat sequence having at least 95% sequence identity to SEQ ID NO: 28; and
   [0524] ii) a tracrRNA having at least 95% sequence identity to SEQ ID NO: 49;
   [0525] wherein said RGN polypeptide comprises an amino acid sequence having at least 95% sequence identity to SEQ ID NO: 8;
[0526] i) a guide RNA comprising:
   [0527] i) a CRISPR RNA comprising a CRISPR repeat sequence having at least 95% sequence identity to SEQ ID NO: 29; and
   [0528] ii) a tracrRNA having at least 95% sequence identity to SEQ ID NO: 50;
   [0529] wherein said RGN polypeptide comprises an amino acid sequence having at least 95% sequence identity to SEQ ID NO: 9;
[0530] j) a guide RNA comprising:
   [0531] i) a CRISPR RNA comprising a CRISPR repeat sequence having at least 95% sequence identity to SEQ ID NO: 30; and
   [0532] ii) a tracrRNA having at least 95% sequence identity to SEQ ID NO: 51;
   [0533] wherein said RGN polypeptide comprises an amino acid sequence having at least 95% sequence identity to SEQ ID NO: 10;
[0534] k) a guide RNA comprising:
   [0535] i) a CRISPR RNA comprising a CRISPR repeat sequence having at least 95% sequence identity to SEQ ID NO: 31; and
   [0536] ii) a tracrRNA having at least 95% sequence identity to SEQ ID NO: 52;
   [0537] wherein said RGN polypeptide comprises an amino acid sequence having at least 95% sequence identity to SEQ ID NO: 11;
[0538] l) a guide RNA comprising:
   [0539] i) a CRISPR RNA comprising a CRISPR repeat sequence having at least 95% sequence identity to SEQ ID NO: 32; and
   [0540] ii) a tracrRNA having at least 95% sequence identity to SEQ ID NO: 53;
   [0541] wherein said RGN polypeptide comprises an amino acid sequence having at least 95% sequence identity to SEQ ID NO: 12;
[0542] m) a guide RNA comprising:
   [0543] i) a CRISPR RNA comprising a CRISPR repeat sequence having at least 95% sequence identity to SEQ ID NO: 33; and
   [0544] ii) a tracrRNA having at least 95% sequence identity to SEQ ID NO: 54;
   [0545] wherein said RGN polypeptide comprises an amino acid sequence having at least 95% sequence identity to SEQ ID NO: 13;
[0546] n) a guide RNA comprising:
   [0547] i) a CRISPR RNA comprising a CRISPR repeat sequence having at least 95% sequence identity to SEQ ID NO: 34; and
   [0548] ii) a tracrRNA having at least 95% sequence identity to SEQ ID NO: 55;
   [0549] wherein said RGN polypeptide comprises an amino acid sequence having at least 95% sequence identity to SEQ ID NO: 14;
[0550] o) a guide RNA comprising:
   [0551] i) a CRISPR RNA comprising a CRISPR repeat sequence having at least 95% sequence identity to SEQ ID NO: 35; and
   [0552] ii) a tracrRNA having at least 95% sequence identity to SEQ ID NO: 56;
   [0553] wherein said RGN polypeptide comprises an amino acid sequence having at least 95% sequence identity to SEQ ID NO: 15;
[0554] p) a guide RNA comprising:
   [0555] i) a CRISPR RNA comprising a CRISPR repeat sequence having at least 95% sequence identity to SEQ ID NO: 36; and
   [0556] ii) a tracrRNA having at least 95% sequence identity to SEQ ID NO: 57;
   [0557] wherein said RGN polypeptide comprises an amino acid sequence having at least 95% sequence identity to SEQ ID NO: 16;
[0558] q) a guide RNA comprising:
   [0559] i) a CRISPR RNA comprising a CRISPR repeat sequence having at least 95% sequence identity to SEQ ID NO: 37; and
   [0560] ii) a tracrRNA having at least 95% sequence identity to SEQ ID NO: 58;
   [0561] wherein said RGN polypeptide comprises an amino acid sequence having at least 95% sequence identity to SEQ ID NO: 17;
[0562] r) a guide RNA comprising:
   [0563] i) a CRISPR RNA comprising a CRISPR repeat sequence having at least 95% sequence identity to SEQ ID NO: 38 or 39; and
   [0564] ii) a tracrRNA having at least 95% sequence identity to SEQ ID NO:59 or 60;
   [0565] wherein said RGN polypeptide comprises an amino acid sequence having at least 95% sequence identity to SEQ ID NO: 18;
[0566] s) a guide RNA comprising:
   [0567] i) a CRISPR RNA comprising a CRISPR repeat sequence having at least 95% sequence identity to SEQ ID NO: 40; and
   [0568] ii) a tracrRNA having at least 95% sequence identity to SEQ ID NO: 61;
   [0569] wherein said RGN polypeptide comprises an amino acid sequence having at least 95% sequence identity to SEQ ID NO: 19; and
[0570] t) a guide RNA comprising:
   [0571] i) a CRISPR RNA comprising a CRISPR repeat sequence having at least 95% sequence identity to SEQ ID NO: 41; and
   [0572] ii) a tracrRNA having at least 95% sequence identity to SEQ ID NO: 62;
   [0573] wherein said RGN polypeptide comprises an amino acid sequence having at least 95% sequence identity to SEQ ID NO: 20.

[0574] 22. The vector of embodiment 19, wherein the guide RNA is selected from the group consisting of:
[0575] a) a guide RNA comprising:
   [0576] i) a CRISPR RNA comprising a CRISPR repeat sequence having at least 100% sequence identity to SEQ ID NO: 21; and
   [0577] ii) a tracrRNA having at least 100% sequence identity to SEQ ID NO: 42;
   [0578] wherein said RGN polypeptide comprises an amino acid sequence having at least 100% sequence identity to SEQ ID NO: 1;
[0579] b) a guide RNA comprising:
   [0580] i) a CRISPR RNA comprising a CRISPR repeat sequence having at least 100% sequence identity to SEQ ID NO: 22; and
   [0581] ii) a tracrRNA having at least 100% sequence identity to SEQ ID NO: 43;
   [0582] wherein said RGN polypeptide comprises an amino acid sequence having at least 100% sequence identity to SEQ ID NO: 2;
[0583] c) a guide RNA comprising:
   [0584] i) a CRISPR RNA comprising a CRISPR repeat sequence having at least 100% sequence identity to SEQ ID NO: 23; and
   [0585] ii) a tracrRNA having at least 100% sequence identity to SEQ ID NO: 44 or nucleotides 19-111 of SEQ ID NO: 1040;
   [0586] wherein said RGN polypeptide comprises an amino acid sequence having at least 100% sequence identity to SEQ ID NO: 3;
[0587] d) a guide RNA comprising:
   [0588] i) a CRISPR RNA comprising a CRISPR repeat sequence having at least 100% sequence identity to SEQ ID NO: 24; and
   [0589] ii) a tracrRNA having at least 100% sequence identity to SEQ ID NO: 45;
   [0590] wherein said RGN polypeptide comprises an amino acid sequence having at least 100% sequence identity to SEQ ID NO: 4;
[0591] e) a guide RNA comprising:
   [0592] i) a CRISPR RNA comprising a CRISPR repeat sequence having at least 100% sequence identity to SEQ ID NO: 25 or nucleotides 1-17 of SEQ ID NO: 1041 or 1042; and ii) a tracrRNA having at least 100% sequence identity to SEQ ID NO: 46 or nucleotides 22-85 of SEQ ID NO: 1041 or 1042;
   [0593] wherein said RGN polypeptide comprises an amino acid sequence having at least 100% sequence identity to SEQ ID NO: 5;
[0594] f) a guide RNA comprising:
   [0595] i) a CRISPR RNA comprising a CRISPR repeat sequence having at least 100% sequence identity to SEQ ID NO: 26; and
   [0596] ii) a tracrRNA having at least 100% sequence identity to SEQ ID NO: 47 or nucleotides 24-138 of SEQ ID NO: 1043;
   [0597] wherein said RGN polypeptide comprises an amino acid sequence having at least 100% sequence identity to SEQ ID NO: 6;
[0598] g) a guide RNA comprising:
   [0599] i) a CRISPR RNA comprising a CRISPR repeat sequence having at least 100% sequence identity to SEQ ID NO: 27 or nucleotides 1-22 of SEQ ID NO: 1044 or 1045; and
   [0600] ii) a tracrRNA having at least 100% sequence identity to SEQ ID NO: 48 or nucleotides 27-96 of SEQ ID NO 1044 or nucleotides 27-95 of SEQ ID NO: 1045;
   [0601] wherein said RGN polypeptide comprises an amino acid sequence having at least 100% sequence identity to SEQ ID NO: 7;
[0602] h) a guide RNA comprising:
   [0603] i) a CRISPR RNA comprising a CRISPR repeat sequence having at least 100% sequence identity to SEQ ID NO: 28; and
   [0604] ii) a tracrRNA having at least 100% sequence identity to SEQ ID NO: 49;
   [0605] wherein said RGN polypeptide comprises an amino acid sequence having at least 100% sequence identity to SEQ ID NO: 8;
[0606] i) a guide RNA comprising:
   [0607] i) a CRISPR RNA comprising a CRISPR repeat sequence having at least 100% sequence identity to SEQ ID NO: 29; and
   [0608] ii) a tracrRNA having at least 100% sequence identity to SEQ ID NO: 50;
   [0609] wherein said RGN polypeptide comprises an amino acid sequence having at least 100% sequence identity to SEQ ID NO: 9;
[0610] j) a guide RNA comprising:
   [0611] i) a CRISPR RNA comprising a CRISPR repeat sequence having at least 100% sequence identity to SEQ ID NO: 30; and
   [0612] ii) a tracrRNA having at least 100% sequence identity to SEQ ID NO: 51;
   [0613] wherein said RGN polypeptide comprises an amino acid sequence having at least 100% sequence identity to SEQ ID NO: 10;
[0614] k) a guide RNA comprising:
   [0615] i) a CRISPR RNA comprising a CRISPR repeat sequence having at least 100% sequence identity to SEQ ID NO: 31; and
   [0616] ii) a tracrRNA having at least 100% sequence identity to SEQ ID NO: 52;
   [0617] wherein said RGN polypeptide comprises an amino acid sequence having at least 100% sequence identity to SEQ ID NO: 11;
[0618] l) a guide RNA comprising:
   [0619] i) a CRISPR RNA comprising a CRISPR repeat sequence having at least 100% sequence identity to SEQ ID NO: 32; and
   [0620] ii) a tracrRNA having at least 100% sequence identity to SEQ ID NO: 53;
   [0621] wherein said RGN polypeptide comprises an amino acid sequence having at least 100% sequence identity to SEQ ID NO: 12;
[0622] m) a guide RNA comprising:
   [0623] i) a CRISPR RNA comprising a CRISPR repeat sequence having at least 100% sequence identity to SEQ ID NO: 33; and
   [0624] ii) a tracrRNA having at least 100% sequence identity to SEQ ID NO: 54;
   [0625] wherein said RGN polypeptide comprises an amino acid sequence having at least 100% sequence identity to SEQ ID NO: 13;
[0626] n) a guide RNA comprising:
   [0627] i) a CRISPR RNA comprising a CRISPR repeat sequence having at least 100% sequence identity to SEQ ID NO: 34; and
   [0628] ii) a tracrRNA having at least 100% sequence identity to SEQ ID NO: 55;
   [0629] wherein said RGN polypeptide comprises an amino acid sequence having at least 100% sequence identity to SEQ ID NO: 14;
[0630] o) a guide RNA comprising:
   [0631] i) a CRISPR RNA comprising a CRISPR repeat sequence having at least 100% sequence identity to SEQ ID NO: 35; and
   [0632] ii) a tracrRNA having at least 100% sequence identity to SEQ ID NO: 56;
   [0633] wherein said RGN polypeptide comprises an amino acid sequence having at least 100% sequence identity to SEQ ID NO: 15;
[0634] p) a guide RNA comprising:
   [0635] i) a CRISPR RNA comprising a CRISPR repeat sequence having at least 100% sequence identity to SEQ ID NO: 36; and
   [0636] ii) a tracrRNA having at least 100% sequence identity to SEQ ID NO: 57;
   [0637] wherein said RGN polypeptide comprises an amino acid sequence having at least 100% sequence identity to SEQ ID NO: 16;
[0638] q) a guide RNA comprising:
   [0639] i) a CRISPR RNA comprising a CRISPR repeat sequence having at least 100% sequence identity to SEQ ID NO: 37; and
   [0640] ii) a tracrRNA having at least 100% sequence identity to SEQ ID NO: 58;
   [0641] wherein said RGN polypeptide comprises an amino acid sequence having at least 100% sequence identity to SEQ ID NO: 17;
[0642] r) a guide RNA comprising:
   [0643] i) a CRISPR RNA comprising a CRISPR repeat sequence having at least 100% sequence identity to SEQ ID NO: 38 or 39; and
   [0644] ii) a tracrRNA having at least 100% sequence identity to SEQ ID NO: 59 or 60;
   [0645] wherein said RGN polypeptide comprises an amino acid sequence having at least 100% sequence identity to SEQ ID NO: 18;
[0646] s) a guide RNA comprising:
   [0647] i) a CRISPR RNA comprising a CRISPR repeat sequence having at least 100% sequence identity to SEQ ID NO: 40; and
   [0648] ii) a tracrRNA having at least 100% sequence identity to SEQ ID NO: 61;
   [0649] wherein said RGN polypeptide comprises an amino acid sequence having at least 100% sequence identity to SEQ ID NO: 19; and
[0650] t) a guide RNA comprising:
   [0651] i) a CRISPR RNA comprising a CRISPR repeat sequence having at least 100% sequence identity to SEQ ID NO: 41; and
   [0652] ii) a tracrRNA having at least 100% sequence identity to SEQ ID NO: 62;
   [0653] wherein said RGN polypeptide comprises an amino acid sequence having at least 100% sequence identity to SEQ ID NO: 20.

[0654] 23. The vector of any one of embodiments 19-22, where said gRNA is a single guide RNA.

[0655] 24. The vector of any one of embodiments 19-22, wherein said gRNA is a dual-guide RNA.

[0656] 25. A cell comprising the nucleic acid molecule of any one of embodiments 1-17 or the vector of any one of embodiments 18-24.

[0657] 26. The cell of embodiment 25, wherein the cell is a prokaryotic cell.

[0658] 27. The cell of embodiment 25, wherein the cell is a eukaryotic cell.

[0659] 28. The cell of embodiment 27, wherein the eukaryotic cell is a mammalian cell.

[0660] 29. The cell of embodiment 28, wherein the mammalian cell is a human cell.

[0661] 30. The cell of embodiment 29, wherein the human cell is an immune cell.

[0662] 31. The cell of embodiment 30, wherein the immune cell is a stem cell.

[0663] 32. The cell of embodiment 31, wherein the stem cell is an induced pluripotent stem cell.

[0664] 33. The cell of embodiment 27, wherein the eukaryotic cell is an insect or avian cell.

[0665] 34. The cell of embodiment 27, wherein the eukaryotic cell is a fungal cell.

[0666] 35. The cell of embodiment 27, wherein the eukaryotic cell is a plant cell.

[0667] 36. A plant comprising the cell of embodiment 35.

[0668] 37. A seed comprising the cell of embodiment 35.

[0669] 38. A method for making an RGN polypeptide comprising culturing the cell of any one of embodiments 25-35 under conditions in which the RGN polypeptide is expressed.

[0670] 39. A method for making an RGN polypeptide comprising introducing into a cell a heterologous nucleic acid molecule comprising a nucleotide sequence encoding an RNA-guided nuclease (RGN) polypeptide comprising an amino acid sequence having at least 90% sequence identity to any one of SEQ ID NOs: 1-20; and culturing said cell under conditions in which the RGN polypeptide is expressed.

[0671] 40. The method of embodiment 39, wherein said RGN polypeptide is capable of binding a target sequence in a target nucleic acid molecule, wherein said target sequence comprises a target strand and a non-target strand, in an RNA-guided sequence specific manner when bound to a guide RNA (gRNA) capable of hybridizing to the non-target strand of said target sequence.

[0672] 41. The method of embodiment 39 or 40, wherein said RGN polypeptide comprises an amino acid sequence having at least 95% sequence identity to any one of SEQ ID NOs: 1-20.

[0673] 42. The method of embodiment 39 or 40, wherein said RGN polypeptide comprises an amino acid sequence having 100% sequence identity to any one of SEQ ID NOs: 1-20.

[0674] 43. The method of any one of embodiments 38-42, further comprising purifying said RGN polypeptide.

[0675] 44. The method of any one of embodiments 38-42, wherein said cell further expresses one or more guide RNAs capable of binding to said RGN polypeptide to form an RGN ribonucleoprotein complex.

[0676] 45. The method of embodiment 42, further comprising purifying said RGN ribonucleoprotein complex.

[0677] 46. An RNA-guided nuclease (RGN) polypeptide, wherein said RGN polypeptide comprises an amino acid sequence having at least 90% sequence identity to any one of SEQ ID NOs: 1-20.

[0678] 47. The RGN polypeptide of embodiment 46, wherein said RGN polypeptide is capable of binding a target sequence in a target nucleic acid molecule, wherein said target sequence comprises a target strand and a non-target strand, in an RNA-guided sequence specific manner when bound to a guide RNA (gRNA) capable of hybridizing to the non-target strand of said target sequence.

[0679] 48. The RGN polypeptide of embodiment 46 or 47, wherein said RGN polypeptide comprises an amino acid sequence having at least 95% sequence identity to any one of SEQ ID NOs: 1-20.

[0680] 49. The RGN polypeptide of embodiment 46 or 47, wherein said RGN polypeptide comprises an amino acid sequence having 100% sequence identity to any one of SEQ ID NOs: 1-20.

[0681] 50. The RGN polypeptide of any one of embodiments 46-49, wherein said RGN polypeptide is an isolated RGN polypeptide.

[0682] 51. The RGN polypeptide of any one of embodiments 46-50, wherein said RGN polypeptide is capable of cleaving said target nucleic acid molecule upon binding.

[0683] 52. The RGN polypeptide of embodiment 51, wherein cleavage by said RGN polypeptide generates a double-stranded break.

[0684] 53. The RGN polypeptide of embodiment 51, wherein cleavage by said RGN polypeptide generates a single-stranded break.

[0685] 54. The RGN polypeptide of any one of embodiments 46-50, wherein said RGN polypeptide is nuclease inactive or a nickase.

[0686] 55. The RGN polypeptide of any one of embodiments 46-54, wherein the RGN polypeptide is operably fused to a base-editing polypeptide.

[0687] 56. The RGN polypeptide of embodiment 55, wherein the base-editing polypeptide is a deaminase.

[0688] 57. The RGN polypeptide of embodiment 56, wherein the deaminase is a cytosine deaminase or an adenine deaminase.

[0689] 58. The RGN polypeptide of embodiment 56, wherein the deaminase has at least 90% sequence identity to an amino acid sequence of any one of SEQ ID NOs: 481-552.

[0690] 59. The RGN polypeptide of embodiment 56, wherein the deaminase has 100% sequence identity to an amino acid sequence of any one of SEQ ID NOs: 481-552.

[0691] 60. The RGN polypeptide of any one of embodiments 46-59, wherein said target sequence is located adjacent to a protospacer adjacent motif (PAM).

[0692] 61. The RGN polypeptide of any one of embodiments 46-60, wherein the RGN polypeptide comprises one or more nuclear localization signals.

[0693] 62. A ribonucleoprotein (RNP) complex comprising the RGN polypeptide of any one of embodiments 46-61 and a guide RNA bound to the RGN polypeptide.

[0694] 63. A nucleic acid molecule comprising a CRISPR RNA (crRNA) or a polynucleotide encoding a crRNA, wherein said crRNA comprises a spacer and a CRISPR repeat, wherein said CRISPR repeat comprises a nucleotide sequence having at least 90% sequence identity to any one of SEQ ID NOs: 21-41, or nucleotides 1-17 of SEQ ID NO: 1041 or 1042, or nucleotides 1-22 of SEQ ID NO: 1044 or 1045.

[0695] 64. The nucleic acid molecule of embodiment 63, wherein a guide RNA comprising:
[0696] a) said crRNA; and
[0697] b) a trans-activating CRISPR RNA (tracrRNA) hybridized to said CRISPR repeat of said crRNA;
[0698] is capable of hybridizing to the non-target strand of a target sequence in a target nucleic acid molecule in a sequence specific manner through the spacer of said crRNA when said guide RNA is bound to an RNA-guided nuclease (RGN) polypeptide.

[0699] 65. The nucleic acid molecule of embodiment 63 or 64, wherein said polynucleotide encoding a crRNA is operably linked to a promoter heterologous to said polynucleotide.

[0700] 66. The nucleic acid molecule of any one of embodiments 63-65, wherein said CRISPR repeat comprises a nucleotide sequence having at least 95% sequence identity to any one of SEQ ID NOs: 21-41, or nucleotides 1-17 of SEQ ID NO: 1041 or 1042, or nucleotides 1-22 of SEQ ID NO: 1044 or 1045.

[0701] 67. The nucleic acid molecule of any one of embodiments 63-65, wherein said CRISPR repeat comprises a nucleotide sequence having 100% sequence identity to any one of SEQ ID NOs: 21-41, or nucleotides 1-17 of SEQ ID NO: 1041 or 1042, or nucleotides 1-22 of SEQ ID NO: 1044 or 1045.

[0702] 68. A vector comprising the nucleic acid molecule comprising said polynucleotide encoding said crRNA of any one of embodiments 63-67.

[0703] 69. The vector of embodiment 68, wherein said vector further comprises a polynucleotide encoding said tracrRNA.

[0704] 70. The vector of embodiment 69, wherein said tracrRNA is selected from the group consisting of:
[0705] a) a tracrRNA having at least 90% sequence identity to SEQ ID NO: 42, wherein said CRISPR repeat has at least 90% sequence identity to SEQ ID NO: 21;
[0706] b) a tracrRNA having at least 90% sequence identity to SEQ ID NO: 43, wherein said CRISPR repeat has at least 90% sequence identity to SEQ ID NO: 22;
[0707] c) a tracrRNA having at least 90% sequence identity to SEQ ID NO: 44 or nucleotides 19-111 of SEQ ID NO: 1040, wherein said CRISPR repeat has at least 90% sequence identity to SEQ ID NO: 23;
[0708] d) a tracrRNA having at least 90% sequence identity to SEQ ID NO: 45, wherein said CRISPR repeat has at least 90% sequence identity to SEQ ID NO: 24;
[0709] e) a tracrRNA having at least 90% sequence identity to SEQ ID NO: 46 or nucleotides 22-85 of SEQ ID NO: 1041 or 1042, wherein said CRISPR repeat has at least 90% sequence identity to SEQ ID NO: 25 or nucleotides 1-17 of SEQ ID NO: 1041 or 1042;
[0710] f) a tracrRNA having at least 90% sequence identity to SEQ ID NO: 47 or nucleotides 1-19 of SEQ ID NO:1043, wherein said CRISPR repeat has at least 90% sequence identity to SEQ ID NO: 26;
[0711] g) a tracrRNA having at least 90% sequence identity to SEQ ID NO: 48 or nucleotides 27-96 of SEQ ID NO 1044 or nucleotides 27-95 of SEQ ID NO: 1045, wherein said CRISPR repeat has at least 90% sequence identity to SEQ ID NO: 27 or nucleotides 1-22 of SEQ ID NO: 1044 or 1045;
[0712] h) a tracrRNA having at least 90% sequence identity to SEQ ID NO: 49, wherein said CRISPR repeat has at least 90% sequence identity to SEQ ID NO: 28;
[0713] i) a tracrRNA having at least 90% sequence identity to SEQ ID NO: 50, wherein said CRISPR repeat has at least 90% sequence identity to SEQ ID NO: 29;
[0714] j) a tracrRNA having at least 90% sequence identity to SEQ ID NO: 51, wherein said CRISPR repeat has at least 90% sequence identity to SEQ ID NO: 30;
[0715] k) a tracrRNA having at least 90% sequence identity to SEQ ID NO: 52, wherein said CRISPR repeat has at least 90% sequence identity to SEQ ID NO: 31;
[0716] l) a tracrRNA having at least 90% sequence identity to SEQ ID NO: 53, wherein said CRISPR repeat has at least 90% sequence identity to SEQ ID NO: 32;
[0717] m) a tracrRNA having at least 90% sequence identity to SEQ ID NO: 54, wherein said CRISPR repeat has at least 90% sequence identity to SEQ ID NO: 33;
[0718] n) a tracrRNA having at least 90% sequence identity to SEQ ID NO: 55, wherein said CRISPR repeat has at least 90% sequence identity to SEQ ID NO: 34;
[0719] o) a tracrRNA having at least 90% sequence identity to SEQ ID NO: 56, wherein said CRISPR repeat has at least 90% sequence identity to SEQ ID NO: 35;
[0720] p) a tracrRNA having at least 90% sequence identity to SEQ ID NO: 57, wherein said CRISPR repeat has at least 90% sequence identity to SEQ ID NO: 36;
[0721] q) a tracrRNA having at least 90% sequence identity to SEQ ID NO: 58, wherein said CRISPR repeat has at least 90% sequence identity to SEQ ID NO: 37;
[0722] r) a tracrRNA having at least 90% sequence identity to SEQ ID NO: 59 or 60, wherein said CRISPR repeat has at least 90% sequence identity to SEQ ID NO: 38 or 39;
[0723] s) a tracrRNA having at least 90% sequence identity to SEQ ID NO: 61, wherein said CRISPR repeat has at least 90% sequence identity to SEQ ID NO: 40; and
[0724] t) a tracrRNA having at least 90% sequence identity to SEQ ID NO: 62, wherein said CRISPR repeat has at least 90% sequence identity to SEQ ID NO: 41.

[0725] 71. The vector of embodiment 69, wherein said tracrRNA is selected from the group consisting of:
[0726] a) a tracrRNA having at least 95% sequence identity to SEQ ID NO: 42, wherein said CRISPR repeat has at least 95% sequence identity to SEQ ID NO: 21;
[0727] b) a tracrRNA having at least 95% sequence identity to SEQ ID NO: 43, wherein said CRISPR repeat has at least 95% sequence identity to SEQ ID NO: 22;
[0728] c) a tracrRNA having at least 95% sequence identity to SEQ ID NO: 44 or nucleotides 19-111 of SEQ ID NO: 1040, wherein said CRISPR repeat has at least 95% sequence identity to SEQ ID NO: 23;
[0729] d) a tracrRNA having at least 95% sequence identity to SEQ ID NO: 45, wherein said CRISPR repeat has at least 95% sequence identity to SEQ ID NO: 24;
[0730] e) a tracrRNA having at least 95% sequence identity to SEQ ID NO: 46 or nucleotides 22-85 of SEQ ID NO: 1041 or 1042, wherein said CRISPR repeat has at least 95% sequence identity to SEQ ID NO: 25 or nucleotides 1-17 of SEQ ID NO: 1041 or 1042;
[0731] f) a tracrRNA having at least 95% sequence identity to SEQ ID NO: 47 or nucleotides 24-138 of SEQ ID NO: 1043, wherein said CRISPR repeat has at least 95% sequence identity to SEQ ID NO: 26;
[0732] g) a tracrRNA having at least 95% sequence identity to SEQ ID NO: 48 or nucleotides 27-96 of SEQ ID NO 1044 or nucleotides 27-95 of SEQ ID NO: 1045, wherein said CRISPR repeat has at least 95% sequence identity to SEQ ID NO: 27 or nucleotides 1-22 of SEQ ID NO: 1044 or 1045;
[0733] h) a tracrRNA having at least 95% sequence identity to SEQ ID NO: 49, wherein said CRISPR repeat has at least 95% sequence identity to SEQ ID NO: 28;
[0734] i) a tracrRNA having at least 95% sequence identity to SEQ ID NO: 50, wherein said CRISPR repeat has at least 95% sequence identity to SEQ ID NO: 29;
[0735] j) a tracrRNA having at least 95% sequence identity to SEQ ID NO: 51, wherein said CRISPR repeat has at least 95% sequence identity to SEQ ID NO: 30;
[0736] k) a tracrRNA having at least 95% sequence identity to SEQ ID NO: 52, wherein said CRISPR repeat has at least 95% sequence identity to SEQ ID NO: 31;
[0737] l) a tracrRNA having at least 95% sequence identity to SEQ ID NO: 53, wherein said CRISPR repeat has at least 95% sequence identity to SEQ ID NO: 32;
[0738] m) a tracrRNA having at least 95% sequence identity to SEQ ID NO: 54, wherein said CRISPR repeat has at least 95% sequence identity to SEQ ID NO: 33;
[0739] n) a tracrRNA having at least 95% sequence identity to SEQ ID NO: 55, wherein said CRISPR repeat has at least 95% sequence identity to SEQ ID NO: 34;
[0740] o) a tracrRNA having at least 95% sequence identity to SEQ ID NO: 56, wherein said CRISPR repeat has at least 95% sequence identity to SEQ ID NO: 35;
[0741] p) a tracrRNA having at least 95% sequence identity to SEQ ID NO: 57, wherein said CRISPR repeat has at least 95% sequence identity to SEQ ID NO: 36;
[0742] q) a tracrRNA having at least 95% sequence identity to SEQ ID NO: 58, wherein said CRISPR repeat has at least 95% sequence identity to SEQ ID NO: 37;
[0743] r) a tracrRNA having at least 95% sequence identity to SEQ ID NO: 59 or 60, wherein said CRISPR repeat has at least 95% sequence identity to SEQ ID NO: 38 or 39;
[0744] s) a tracrRNA having at least 95% sequence identity to SEQ ID NO: 61, wherein said CRISPR repeat has at least 95% sequence identity to SEQ ID NO: 40; and
[0745] t) a tracrRNA having at least 95% sequence identity to SEQ ID NO: 62, wherein said CRISPR repeat has at least 95% sequence identity to SEQ ID NO: 41.

[0746] 72. The vector of embodiment 69, wherein said tracrRNA is selected from the group consisting of:
[0747] a) a tracrRNA having at least 100% sequence identity to SEQ ID NO: 42, wherein said CRISPR repeat has at least 100% sequence identity to SEQ ID NO: 21;
[0748] b) a tracrRNA having at least 100% sequence identity to SEQ ID NO: 43, wherein said CRISPR repeat has at least 100% sequence identity to SEQ ID NO: 22;
[0749] c) a tracrRNA having at least 100% sequence identity to SEQ ID NO: 44 or nucleotides 19-111 of SEQ ID NO: 1040, wherein said CRISPR repeat has at least 100% sequence identity to SEQ ID NO: 23;
[0750] d) a tracrRNA having at least 100% sequence identity to SEQ ID NO: 45, wherein said CRISPR repeat has at least 100% sequence identity to SEQ ID NO: 24;
[0751] e) a tracrRNA having at least 100% sequence identity to SEQ ID NO: 46 or nucleotides 22-85 of SEQ ID NO: 1041 or 1042, wherein said CRISPR repeat has at least 100% sequence identity to SEQ ID NO: 25 or nucleotides 1-17 of SEQ ID NO: 1041 or 1042;
[0752] f) a tracrRNA having at least 100% sequence identity to SEQ ID NO: 47 or nucleotides 24-138 of SEQ ID NO: 1043, wherein said CRISPR repeat has at least 100% sequence identity to SEQ ID NO: 26;
[0753] g) a tracrRNA having at least 100% sequence identity to SEQ ID NO: 48 or nucleotides 27-96 of SEQ ID NO 1044 or nucleotides 27-95 of SEQ ID NO: 1045, wherein said CRISPR repeat has at least 100% sequence identity to SEQ ID NO: 27 or nucleotides 1-22 of SEQ ID NO: 1044 or 1045;
[0754] h) a tracrRNA having at least 100% sequence identity to SEQ ID NO: 49, wherein said CRISPR repeat has at least 100% sequence identity to SEQ ID NO: 28;
[0755] i) a tracrRNA having at least 100% sequence identity to SEQ ID NO: 50, wherein said CRISPR repeat has at least 100% sequence identity to SEQ ID NO: 29;
[0756] j) a tracrRNA having at least 100% sequence identity to SEQ ID NO: 51, wherein said CRISPR repeat has at least 100% sequence identity to SEQ ID NO: 30;
[0757] k) a tracrRNA having at least 100% sequence identity to SEQ ID NO: 52, wherein said CRISPR repeat has at least 100% sequence identity to SEQ ID NO: 31;
[0758] l) a tracrRNA having at least 100% sequence identity to SEQ ID NO: 53, wherein said CRISPR repeat has at least 100% sequence identity to SEQ ID NO: 32;
[0759] m) a tracrRNA having at least 100% sequence identity to SEQ ID NO: 54, wherein said CRISPR repeat has at least 100% sequence identity to SEQ ID NO: 33;
[0760] n) a tracrRNA having at least 100% sequence identity to SEQ ID NO: 55, wherein said CRISPR repeat has at least 100% sequence identity to SEQ ID NO: 34;
[0761] o) a tracrRNA having at least 100% sequence identity to SEQ ID NO: 56, wherein said CRISPR repeat has at least 100% sequence identity to SEQ ID NO: 35;
[0762] p) a tracrRNA having at least 100% sequence identity to SEQ ID NO: 57, wherein said CRISPR repeat has at least 100% sequence identity to SEQ ID NO: 36;
[0763] q) a tracrRNA having at least 100% sequence identity to SEQ ID NO: 58, wherein said CRISPR repeat has at least 100% sequence identity to SEQ ID NO: 37;
[0764] r) a tracrRNA having at least 100% sequence identity to SEQ ID NO: 59 or 60, wherein said CRISPR repeat has at least 100% sequence identity to SEQ ID NO: 38 or 39;
[0765] s) a tracrRNA having at least 100% sequence identity to SEQ ID NO: 61, wherein said CRISPR repeat has at least 100% sequence identity to SEQ ID NO: 40; and
[0766] t) a tracrRNA having at least 100% sequence identity to SEQ ID NO: 62, wherein said CRISPR repeat has at least 100% sequence identity to SEQ ID NO: 41.

[0767] 73. The vector of any one of embodiments 69-72, wherein said polynucleotide encoding said crRNA and said polynucleotide encoding said tracrRNA are operably linked to the same promoter and are encoded as a single guide RNA.

[0768] 74. The vector of any one of embodiments 69-72, wherein said polynucleotide encoding said crRNA and said polynucleotide encoding said tracrRNA are operably linked to separate promoters.

[0769] 75. The vector of any one of embodiments 69-74, wherein said vector further comprises a polynucleotide encoding said RGN polypeptide.

[0770] 76. The vector of embodiment 75, wherein said RGN polypeptide is selected from the group consisting of:
[0771] a) a RGN polypeptide having at least 90% sequence identity to SEQ ID NO: 1, wherein said CRISPR repeat has at least 90% sequence identity to SEQ ID NO: 21 and said tracrRNA has at least 90% sequence identity to SEQ ID NO: 42;
[0772] b) a RGN polypeptide having at least 90% sequence identity to SEQ ID NO: 2, wherein said CRISPR repeat has at least 90% sequence identity to SEQ ID NO: 22 and said tracrRNA has at least 90% sequence identity to SEQ ID NO: 43;
[0773] c) a RGN polypeptide having at least 90% sequence identity to SEQ ID NO: 3, wherein said CRISPR repeat has at least 90% sequence identity to SEQ ID NO: 23 and said tracrRNA has at least 90% sequence identity to SEQ ID NO: 44 or nucleotides 19-111 of SEQ ID NO: 1040;
[0774] d) a RGN polypeptide having at least 90% sequence identity to SEQ ID NO: 4, wherein said CRISPR repeat has at least 90% sequence identity to SEQ ID NO: 24 and said tracrRNA has at least 90% sequence identity to SEQ ID NO: 45;
[0775] e) a RGN polypeptide having at least 90% sequence identity to SEQ ID NO: 5, wherein said CRISPR repeat has at least 90% sequence identity to SEQ ID NO: 25 or nucleotides 1-17 of SEQ ID NO: 1041 or 1042 and said tracrRNA has at least 90% sequence identity to SEQ ID NO: 46 or nucleotides 22-85 of SEQ ID NO: 1041 or 1042;
[0776] f) a RGN polypeptide having at least 90% sequence identity to SEQ ID NO: 6, wherein said CRISPR repeat has at least 90% sequence identity to SEQ ID NO:26 and said tracrRNA has at least 90% sequence identity to SEQ ID NO: 47 or nucleotides 24-138 of SEQ ID NO: 1043;
[0777] g) a RGN polypeptide having at least 90% sequence identity to SEQ ID NO: 7, wherein said CRISPR repeat has at least 90% sequence identity to SEQ ID NO: 27 or nucleotides 1-22 of SEQ ID NO: 1044 or 1045 and said tracrRNA has at least 90% sequence identity to SEQ ID NO: 48 or nucleotides 27-96 of SEQ ID NO 1044 or nucleotides 27-95 of SEQ ID NO: 1045;
[0778] h) a RGN polypeptide having at least 90% sequence identity to SEQ ID NO: 8, wherein said CRISPR repeat has at least 90% sequence identity to SEQ ID NO: 28 and said tracrRNA has at least 90% sequence identity to SEQ ID NO: 49;
[0779] i) a RGN polypeptide having at least 90% sequence identity to SEQ ID NO: 9, wherein said CRISPR repeat has at least 90% sequence identity to SEQ ID NO: 29 and said tracrRNA has at least 90% sequence identity to SEQ ID NO: 50;
[0780] j) a RGN polypeptide having at least 90% sequence identity to SEQ ID NO: 10, wherein said CRISPR repeat has at least 90% sequence identity to SEQ ID NO: 30 and said tracrRNA has at least 90% sequence identity to SEQ ID NO: 51;
[0781] k) a RGN polypeptide having at least 90% sequence identity to SEQ ID NO: 11, wherein said CRISPR repeat has at least 90% sequence identity to SEQ ID NO: 31 and said tracrRNA has at least 90% sequence identity to SEQ ID NO: 52;
[0782] l) a RGN polypeptide having at least 90% sequence identity to SEQ ID NO: 12, wherein said CRISPR repeat has at least 90% sequence identity to SEQ ID NO: 32 and said tracrRNA has at least 90% sequence identity to SEQ ID NO: 53;
[0783] m) a RGN polypeptide having at least 90% sequence identity to SEQ ID NO: 13, wherein said CRISPR repeat has at least 90% sequence identity to SEQ ID NO: 33 and said tracrRNA has at least 90% sequence identity to SEQ ID NO: 54;
[0784] n) a RGN polypeptide having at least 90% sequence identity to SEQ ID NO: 14, wherein said CRISPR repeat has at least 90% sequence identity to SEQ ID NO: 34 and said tracrRNA has at least 90% sequence identity to SEQ ID NO: 55;
[0785] o) a RGN polypeptide having at least 90% sequence identity to SEQ ID NO: 15, wherein said CRISPR repeat has at least 90% sequence identity to SEQ ID NO: 35 and said tracrRNA has at least 90% sequence identity to SEQ ID NO: 56;
[0786] p) a RGN polypeptide having at least 90% sequence identity to SEQ ID NO: 16, wherein said CRISPR repeat has at least 90% sequence identity to SEQ ID NO: 36 and said tracrRNA has at least 90% sequence identity to SEQ ID NO: 57;
[0787] q) a RGN polypeptide having at least 90% sequence identity to SEQ ID NO: 17, wherein said CRISPR repeat has at least 90% sequence identity to SEQ ID NO: 37 and said tracrRNA has at least 90% sequence identity to SEQ ID NO: 58;
[0788] r) a RGN polypeptide having at least 90% sequence identity to SEQ ID NO: 18, wherein said CRISPR repeat has at least 90% sequence identity to SEQ ID NO: 38 or 39 and said tracrRNA has at least 90% sequence identity to SEQ ID NO: 59 or 60;
[0789] s) a RGN polypeptide having at least 90% sequence identity to SEQ ID NO: 19, wherein said CRISPR repeat has at least 90% sequence identity to SEQ ID NO: 40 and said tracrRNA has at least 90% sequence identity to SEQ ID NO: 61; and
[0790] t) a RGN polypeptide having at least 90% sequence identity to SEQ ID NO: 20, wherein said CRISPR repeat has at least 90% sequence identity to SEQ ID NO: 41 and said tracrRNA has at least 90% sequence identity to SEQ ID NO: 62.

[0791] 77. The vector of embodiment 75, wherein said RGN polypeptide is selected from the group consisting of:
[0792] a) a RGN polypeptide having at least 95% sequence identity to SEQ ID NO: 1, wherein said CRISPR repeat has at least 95% sequence identity to SEQ ID NO: 21 and said tracrRNA has at least 95% sequence identity to SEQ ID NO: 42;
[0793] b) a RGN polypeptide having at least 95% sequence identity to SEQ ID NO: 2, wherein said CRISPR repeat has at least 95% sequence identity to SEQ ID NO: 22 and said tracrRNA has at least 95% sequence identity to SEQ ID NO: 43;
[0794] c) a RGN polypeptide having at least 95% sequence identity to SEQ ID NO: 3, wherein said CRISPR repeat has at least 95% sequence identity to SEQ ID NO: 23 and said tracrRNA has at least 95% sequence identity to SEQ ID NO: 44 or nucleotides 19-111 of SEQ ID NO: 1040;
[0795] d) a RGN polypeptide having at least 95% sequence identity to SEQ ID NO: 4, wherein said CRISPR repeat has at least 95% sequence identity to SEQ ID NO: 24 and said tracrRNA has at least 95% sequence identity to SEQ ID NO: 45;
[0796] e) a RGN polypeptide having at least 95% sequence identity to SEQ ID NO: 5, wherein said CRISPR repeat has at least 95% sequence identity to SEQ ID NO: 25 or nucleotides 1-17 of SEQ ID NO: 1041 or 1042 and said tracrRNA has at least 95% sequence identity to SEQ ID NO: 46 or nucleotides 22-85 of SEQ ID NO: 1041 or 1042;
[0797] f) a RGN polypeptide having at least 95% sequence identity to SEQ ID NO: 6, wherein said CRISPR repeat has at least 95% sequence identity to SEQ ID NO:26 and said tracrRNA has at least 95% sequence identity to SEQ ID NO: 47 or nucleotides 24-138 of SEQ ID NO: 1043;
[0798] g) a RGN polypeptide having at least 95% sequence identity to SEQ ID NO: 7, wherein said CRISPR repeat has at least 95% sequence identity to SEQ ID NO: 27 or nucleotides 1-22 of SEQ ID NO: 1044 or 1045 and said tracrRNA has at least 95% sequence identity to SEQ ID NO: 48 or nucleotides 27-96 of SEQ ID NO 1044 or nucleotides 27-95 of SEQ ID NO: 1045;
[0799] h) a RGN polypeptide having at least 95% sequence identity to SEQ ID NO: 8, wherein said CRISPR repeat has at least 95% sequence identity to SEQ ID NO: 28 and said tracrRNA has at least 95% sequence identity to SEQ ID NO: 49;
[0800] i) a RGN polypeptide having at least 95% sequence identity to SEQ ID NO: 9, wherein said CRISPR repeat has at least 95% sequence identity to SEQ ID NO: 29 and said tracrRNA has at least 95% sequence identity to SEQ ID NO: 50;
[0801] j) a RGN polypeptide having at least 95% sequence identity to SEQ ID NO: 10, wherein said CRISPR repeat has at least 95% sequence identity to SEQ ID NO: 30 and said tracrRNA has at least 95% sequence identity to SEQ ID NO: 51;
[0802] k) a RGN polypeptide having at least 95% sequence identity to SEQ ID NO: 11, wherein said CRISPR repeat has at least 95% sequence identity to SEQ ID NO: 31 and said tracrRNA has at least 95% sequence identity to SEQ ID NO: 52;
[0803] l) a RGN polypeptide having at least 95% sequence identity to SEQ ID NO: 12, wherein said CRISPR repeat has at least 95% sequence identity to SEQ ID NO: 32 and said tracrRNA has at least 95% sequence identity to SEQ ID NO: 53;
[0804] m) a RGN polypeptide having at least 95% sequence identity to SEQ ID NO: 13, wherein said CRISPR repeat has at least 95% sequence identity to SEQ ID NO: 33 and said tracrRNA has at least 95% sequence identity to SEQ ID NO: 54;
[0805] n) a RGN polypeptide having at least 95% sequence identity to SEQ ID NO: 14, wherein said CRISPR repeat has at least 95% sequence identity to SEQ ID NO: 34 and said tracrRNA has at least 95% sequence identity to SEQ ID NO: 55;
[0806] o) a RGN polypeptide having at least 95% sequence identity to SEQ ID NO: 15, wherein said CRISPR repeat has at least 95% sequence identity to SEQ ID NO: 35 and said tracrRNA has at least 95% sequence identity to SEQ ID NO: 56;
[0807] p) a RGN polypeptide having at least 95% sequence identity to SEQ ID NO: 16, wherein said CRISPR repeat has at least 95% sequence identity to SEQ ID NO: 36 and said tracrRNA has at least 95% sequence identity to SEQ ID NO: 57;
[0808] q) a RGN polypeptide having at least 95% sequence identity to SEQ ID NO: 17, wherein said CRISPR repeat has at least 95% sequence identity to SEQ ID NO: 37 and said tracrRNA has at least 95% sequence identity to SEQ ID NO: 58;
[0809] r) a RGN polypeptide having at least 95% sequence identity to SEQ ID NO: 18, wherein said CRISPR repeat has at least 95% sequence identity to SEQ ID NO: 38 or 39 and said tracrRNA has at least 95% sequence identity to SEQ ID NO: 59 or 60;
[0810] s) a RGN polypeptide having at least 95% sequence identity to SEQ ID NO: 19, wherein said CRISPR repeat has at least 95% sequence identity to SEQ ID NO: 40 and said tracrRNA has at least 95% sequence identity to SEQ ID NO: 61; and
[0811] t) a RGN polypeptide having at least 95% sequence identity to SEQ ID NO: 20, wherein said CRISPR repeat has at least 95% sequence identity to SEQ ID NO: 41 and said tracrRNA has at least 95% sequence identity to SEQ ID NO: 62.

[0812] 78. The vector of embodiment 75, wherein said RGN polypeptide is selected from the group consisting of:
[0813] a) a RGN polypeptide having at least 100% sequence identity to SEQ ID NO: 1, wherein said CRISPR repeat has at least 100% sequence identity to SEQ ID NO: 21 and said tracrRNA has at least 100% sequence identity to SEQ ID NO: 42;
[0814] b) a RGN polypeptide having at least 100% sequence identity to SEQ ID NO: 2, wherein said CRISPR repeat has at least 100% sequence identity to SEQ ID NO: 22 and said tracrRNA has at least 100% sequence identity to SEQ ID NO: 43;
[0815] c) a RGN polypeptide having at least 100% sequence identity to SEQ ID NO: 3, wherein said CRISPR repeat has at least 100% sequence identity to SEQ ID NO: 23 and said tracrRNA has at least 100% sequence identity to SEQ ID NO: 44 or nucleotides 19-111 of SEQ ID NO: 1040;
[0816] d) a RGN polypeptide having at least 100% sequence identity to SEQ ID NO: 4, wherein said CRISPR repeat has at least 100% sequence identity to SEQ ID NO: 24 and said tracrRNA has at least 100% sequence identity to SEQ ID NO: 45;
[0817] e) a RGN polypeptide having at least 100% sequence identity to SEQ ID NO: 5, wherein said CRISPR repeat has at least 100% sequence identity to SEQ ID NO: 25 or nucleotides 1-17 of SEQ ID NO: 1041 or 1042 and said tracrRNA has at least 100% sequence identity to SEQ ID NO: 46 or nucleotides 22-85 of SEQ ID NO: 1041 or 1042;
[0818] f) a RGN polypeptide having at least 100% sequence identity to SEQ ID NO: 6, wherein said CRISPR repeat has at least 100% sequence identity to SEQ ID NO:26 and said tracrRNA has at least 100% sequence identity to SEQ ID NO: 47 or nucleotides 24-138 of SEQ ID NO: 1043;
[0819] g) a RGN polypeptide having at least 100% sequence identity to SEQ ID NO: 7, wherein said CRISPR repeat has at least 100% sequence identity to SEQ ID NO: 27 or nucleotides 1-22 of SEQ ID NO: 1044 or 1045 and said tracrRNA has at least 100% sequence identity to SEQ ID NO: 48 or nucleotides 27-96 of SEQ ID NO 1044 or nucleotides 27-95 of SEQ ID NO: 1045;
[0820] h) a RGN polypeptide having at least 100% sequence identity to SEQ ID NO: 8, wherein said CRISPR repeat has at least 100% sequence identity to SEQ ID NO: 28 and said tracrRNA has at least 100% sequence identity to SEQ ID NO: 49;
[0821] i) a RGN polypeptide having at least 100% sequence identity to SEQ ID NO: 9, wherein said CRISPR repeat has at least 100% sequence identity to SEQ ID NO: 29 and said tracrRNA has at least 100% sequence identity to SEQ ID NO: 50;
[0822] j) a RGN polypeptide having at least 100% sequence identity to SEQ ID NO: 10, wherein said CRISPR repeat has at least 100% sequence identity to SEQ ID NO: 30 and said tracrRNA has at least 100% sequence identity to SEQ ID NO: 51;
[0823] k) a RGN polypeptide having at least 100% sequence identity to SEQ ID NO: 11, wherein said CRISPR repeat has at least 100% sequence identity to SEQ ID NO: 31 and said tracrRNA has at least 100% sequence identity to SEQ ID NO: 52;
[0824] l) a RGN polypeptide having at least 100% sequence identity to SEQ ID NO: 12, wherein said CRISPR repeat has at least 100% sequence identity to SEQ ID NO: 32 and said tracrRNA has at least 100% sequence identity to SEQ ID NO: 53;
[0825] m) a RGN polypeptide having at least 100% sequence identity to SEQ ID NO: 13, wherein said CRISPR repeat has at least 100% sequence identity to SEQ ID NO: 33 and said tracrRNA has at least 100% sequence identity to SEQ ID NO: 54;
[0826] n) a RGN polypeptide having at least 100% sequence identity to SEQ ID NO: 14, wherein said CRISPR repeat has at least 100% sequence identity to SEQ ID NO: 34 and said tracrRNA has at least 100% sequence identity to SEQ ID NO: 55;
[0827] o) a RGN polypeptide having at least 100% sequence identity to SEQ ID NO: 15, wherein said CRISPR repeat has at least 100% sequence identity to SEQ ID NO: 35 and said tracrRNA has at least 100% sequence identity to SEQ ID NO: 56;
[0828] p) a RGN polypeptide having at least 100% sequence identity to SEQ ID NO: 16, wherein said CRISPR repeat has at least 100% sequence identity to SEQ ID NO: 36 and said tracrRNA has at least 100% sequence identity to SEQ ID NO: 57;
[0829] q) a RGN polypeptide having at least 100% sequence identity to SEQ ID NO: 17, wherein said CRISPR repeat has at least 100% sequence identity to SEQ ID NO: 37 and said tracrRNA has at least 100% sequence identity to SEQ ID NO: 58;
[0830] r) a RGN polypeptide having at least 100% sequence identity to SEQ ID NO: 18, wherein said CRISPR repeat has at least 100% sequence identity to SEQ ID NO: 38 or 39 and said tracrRNA has at least 100% sequence identity to SEQ ID NO: 59 or 60;
[0831] s) a RGN polypeptide having at least 100% sequence identity to SEQ ID NO: 19, wherein said CRISPR repeat has at least 100% sequence identity to SEQ ID NO: 40 and said tracrRNA has at least 100% sequence identity to SEQ ID NO: 61; and
[0832] t) a RGN polypeptide having at least 100% sequence identity to SEQ ID NO: 20, wherein said CRISPR repeat has at least 100% sequence identity to SEQ ID NO: 41 and said tracrRNA has at least 100% sequence identity to SEQ ID NO: 62.

[0833] 79. A nucleic acid molecule comprising a trans-activating CRISPR RNA (tracrRNA) or a polynucleotide encoding a tracrRNA comprising a nucleotide sequence having at least 90% sequence identity to any one of SEQ ID NOs: 42-62, nucleotides 19-111 of SEQ ID NO: 1040, nucleotides 22-85 of SEQ ID NO: 1041 or 1042, nucleotides 24-138 of SEQ ID NO: 143, nucleotides 27-96 of SEQ ID NO: 1044, or nucleotides 27-95 of SEQ ID NO: 1045.

[0834] 80. The nucleic acid molecule of embodiment 79, wherein a guide RNA comprising:
[0835] a) said tracrRNA; and
[0836] b) a crRNA comprising a spacer and a CRISPR repeat, wherein said tracrRNA hybridizes with said CRISPR repeat of said crRNA;
[0837] is capable of hybridizing to the non-target strand of a target sequence in a target nucleic acid molecule in a sequence specific manner through the spacer of said crRNA when said guide RNA is bound to an RNA-guided nuclease (RGN) polypeptide.

[0838] 81. The nucleic acid molecule of embodiment 79 or 80, wherein said polynucleotide encoding a tracrRNA is operably linked to a promoter heterologous to said polynucleotide.

[0839] 82. The nucleic acid molecule of any one of embodiments 79-81, wherein said tracrRNA comprises a nucleotide sequence having at least 95% sequence identity to any one of SEQ ID NOs: 42-62, nucleotides 19-111 of SEQ ID NO: 1040, nucleotides 22-85 of SEQ ID NO: 1041 or 1042, nucleotides 24-138 of SEQ ID NO: 143, nucleotides 27-96 of SEQ ID NO: 1044, or nucleotides 27-95 of SEQ ID NO: 1045.

[0840] 83. The nucleic acid molecule of any one of embodiments 79-81, wherein said tracrRNA comprises a nucleotide sequence having 100% sequence identity to any one of SEQ ID NOs: 42-62, nucleotides 19-111 of SEQ ID NO: 1040, nucleotides 22-85 of SEQ ID NO: 1041 or 1042, nucleotides 24-138 of SEQ ID NO: 143, nucleotides 27-96 of SEQ ID NO: 1044, or nucleotides 27-95 of SEQ ID NO: 1045.

[0841] 84. A vector comprising the nucleic acid molecule comprising said polynucleotide encoding said tracrRNA of any one of embodiments 79-83.

[0842] 85. The vector of embodiment 84, wherein said vector further comprises a polynucleotide encoding said crRNA.

[0843] 86. The vector of embodiment 85, wherein said crRNA comprises a CRISPR repeat selected from the group consisting of:
[0844] a) a CRISPR repeat having at least 90% sequence identity to SEQ ID NO: 21, wherein said tracrRNA has at least 90% sequence identity to SEQ ID NO: 42;
[0845] b) a CRISPR repeat having at least 90% sequence identity to SEQ ID NO: 22, wherein said tracrRNA has at least 90% sequence identity to SEQ ID NO: 43;
[0846] c) a CRISPR repeat having at least 90% sequence identity to SEQ ID NO: 23, wherein said tracrRNA has at least 90% sequence identity to SEQ ID NO: 44 or nucleotides 19-111 of SEQ ID NO: 1040;
[0847] d) a CRISPR repeat having at least 90% sequence identity to SEQ ID NO: 24, wherein said tracrRNA has at least 90% sequence identity to SEQ ID NO: 45;
[0848] e) a CRISPR repeat having at least 90% sequence identity to SEQ ID NO: 25 or nucleotides 1-17 of SEQ ID NO: 1041 or 1042, wherein said tracrRNA has at least 90% sequence identity to SEQ ID NO: 46 or nucleotides 22-85 of SEQ ID NO: 1041 or 1042;
[0849] f) a CRISPR repeat having at least 90% sequence identity to SEQ ID NO: 26, wherein said tracrRNA has at least 90% sequence identity to SEQ ID NO: 47 or nucleotides 24-138 of SEQ ID NO: 1043;
[0850] g) a CRISPR repeat having at least 90% sequence identity to SEQ ID NO: 27 or nucleotides 1-22 of SEQ ID NO: 1044 or 1045, wherein said tracrRNA has at least 90% sequence identity to SEQ ID NO: 48 or nucleotides 27-96 of SEQ ID NO 1044 or nucleotides 27-95 of SEQ ID NO: 1045;
[0851] h) a CRISPR repeat having at least 90% sequence identity to SEQ ID NO: 28, wherein said tracrRNA has at least 90% sequence identity to SEQ ID NO: 49;
[0852] i) a CRISPR repeat having at least 90% sequence identity to SEQ ID NO: 29, wherein said tracrRNA has at least 90% sequence identity to SEQ ID NO: 50;
[0853] j) a CRISPR repeat having at least 90% sequence identity to SEQ ID NO: 30, wherein said tracrRNA has at least 90% sequence identity to SEQ ID NO: 51;
[0854] k) a CRISPR repeat having at least 90% sequence identity to SEQ ID NO: 31, wherein said tracrRNA has at least 90% sequence identity to SEQ ID NO: 52;
[0855] l) a CRISPR repeat having at least 90% sequence identity to SEQ ID NO: 32, wherein said tracrRNA has at least 90% sequence identity to SEQ ID NO: 53;
[0856] m) a CRISPR repeat having at least 90% sequence identity to SEQ ID NO: 33, wherein said tracrRNA has at least 90% sequence identity to SEQ ID NO: 54;
[0857] n) a CRISPR repeat having at least 90% sequence identity to SEQ ID NO: 34, wherein said tracrRNA has at least 90% sequence identity to SEQ ID NO: 55;
[0858] o) a CRISPR repeat having at least 90% sequence identity to SEQ ID NO: 35, wherein said tracrRNA has at least 90% sequence identity to SEQ ID NO: 56;
[0859] p) a CRISPR repeat having at least 90% sequence identity to SEQ ID NO: 36, wherein said tracrRNA has at least 90% sequence identity to SEQ ID NO: 57;
[0860] q) a CRISPR repeat having at least 90% sequence identity to SEQ ID NO: 37, wherein said tracrRNA has at least 90% sequence identity to SEQ ID NO: 58;
[0861] r) a CRISPR repeat having at least 90% sequence identity to SEQ ID NO: 38 or 39, wherein said tracrRNA has at least 90% sequence identity to SEQ ID NO: 59 or 60;
[0862] s) a CRISPR repeat having at least 90% sequence identity to SEQ ID NO: 40, wherein said tracrRNA has at least 90% sequence identity to SEQ ID NO: 61; and
[0863] t) a CRISPR repeat having at least 90% sequence identity to SEQ ID NO: 41, wherein said tracrRNA has at least 90% sequence identity to SEQ ID NO: 62.

[0864] 87. The vector of embodiment 85, wherein said crRNA comprises a CRISPR repeat selected from the group consisting of:
[0865] a) a CRISPR repeat having at least 95% sequence identity to SEQ ID NO: 21, wherein said tracrRNA has at least 95% sequence identity to SEQ ID NO: 42;
[0866] b) a CRISPR repeat having at least 95% sequence identity to SEQ ID NO: 22, wherein said tracrRNA has at least 95% sequence identity to SEQ ID NO: 43;
[0867] c) a CRISPR repeat having at least 95% sequence identity to SEQ ID NO: 23, wherein said tracrRNA has at least 95% sequence identity to SEQ ID NO: 44 or nucleotides 19-111 of SEQ ID NO: 1040;
[0868] d) a CRISPR repeat having at least 95% sequence identity to SEQ ID NO: 24, wherein said tracrRNA has at least 95% sequence identity to SEQ ID NO: 45;
[0869] e) a CRISPR repeat having at least 95% sequence identity to SEQ ID NO: 25 or nucleotides 1-17 of SEQ ID NO: 1041 or 1042, wherein said tracrRNA has at least 95% sequence identity to SEQ ID NO: 46 or nucleotides 22-85 of SEQ ID NO: 1041 or 1042;
[0870] f) a CRISPR repeat having at least 95% sequence identity to SEQ ID NO: 26, wherein said tracrRNA has at least 95% sequence identity to SEQ ID NO: 47 or nucleotides 24-138 of SEQ ID NO: 1043;
[0871] g) a CRISPR repeat having at least 95% sequence identity to SEQ ID NO: 27 or nucleotides 1-22 of SEQ ID NO: 1044 or 1045, wherein said tracrRNA has at least 95% sequence identity to SEQ ID NO: 48 or nucleotides 27-96 of SEQ ID NO 1044 or nucleotides 27-95 of SEQ ID NO: 1045;
[0872] h) a CRISPR repeat having at least 95% sequence identity to SEQ ID NO: 28, wherein said tracrRNA has at least 95% sequence identity to SEQ ID NO: 49;
[0873] i) a CRISPR repeat having at least 95% sequence identity to SEQ ID NO: 29, wherein said tracrRNA has at least 95% sequence identity to SEQ ID NO: 50;
[0874] j) a CRISPR repeat having at least 95% sequence identity to SEQ ID NO: 30, wherein said tracrRNA has at least 95% sequence identity to SEQ ID NO: 51;
[0875] k) a CRISPR repeat having at least 95% sequence identity to SEQ ID NO: 31, wherein said tracrRNA has at least 95% sequence identity to SEQ ID NO: 52;
[0876] l) a CRISPR repeat having at least 95% sequence identity to SEQ ID NO: 32, wherein said tracrRNA has at least 95% sequence identity to SEQ ID NO: 53;
[0877] m) a CRISPR repeat having at least 95% sequence identity to SEQ ID NO: 33, wherein said tracrRNA has at least 95% sequence identity to SEQ ID NO: 54;
[0878] n) a CRISPR repeat having at least 95% sequence identity to SEQ ID NO: 34, wherein said tracrRNA has at least 95% sequence identity to SEQ ID NO: 55;
[0879] o) a CRISPR repeat having at least 95% sequence identity to SEQ ID NO: 35, wherein said tracrRNA has at least 95% sequence identity to SEQ ID NO: 56;
[0880] p) a CRISPR repeat having at least 95% sequence identity to SEQ ID NO: 36, wherein said tracrRNA has at least 95% sequence identity to SEQ ID NO: 57;
[0881] q) a CRISPR repeat having at least 95% sequence identity to SEQ ID NO: 37, wherein said tracrRNA has at least 95% sequence identity to SEQ ID NO: 58;
[0882] r) a CRISPR repeat having at least 95% sequence identity to SEQ ID NO: 38 or 39, wherein said tracrRNA has at least 95% sequence identity to SEQ ID NO: 59 or 60;
[0883] s) a CRISPR repeat having at least 95% sequence identity to SEQ ID NO: 40, wherein said tracrRNA has at least 95% sequence identity to SEQ ID NO: 61; and
[0884] t) a CRISPR repeat having at least 95% sequence identity to SEQ ID NO: 41, wherein said tracrRNA has at least 95% sequence identity to SEQ ID NO: 62.

[0885] 88. The vector of embodiment 85, wherein said crRNA comprises a CRISPR repeat selected from the group consisting of:
[0886] a) a CRISPR repeat having at least 100% sequence identity to SEQ ID NO: 21, wherein said tracrRNA has at least 100% sequence identity to SEQ ID NO: 42;
[0887] b) a CRISPR repeat having at least 100% sequence identity to SEQ ID NO: 22, wherein said tracrRNA has at least 100% sequence identity to SEQ ID NO: 43;
[0888] c) a CRISPR repeat having at least 100% sequence identity to SEQ ID NO: 23, wherein said tracrRNA has at least 100% sequence identity to SEQ ID NO: 44 or nucleotides 19-111 of SEQ ID NO: 1040;
[0889] d) a CRISPR repeat having at least 100% sequence identity to SEQ ID NO: 24, wherein said tracrRNA has at least 100% sequence identity to SEQ ID NO: 45;
[0890] e) a CRISPR repeat having at least 100% sequence identity to SEQ ID NO: 25 or nucleotides 1-17 of SEQ ID NO: 1041 or 1042, wherein said tracrRNA has at least 100% sequence identity to SEQ ID NO: 46 or nucleotides 22-85 of SEQ ID NO: 1041 or 1042;
[0891] f) a CRISPR repeat having at least 100% sequence identity to SEQ ID NO: 26, wherein said tracrRNA has at least 100% sequence identity to SEQ ID NO: 47 or nucleotides 24-138 of SEQ ID NO: 1043;
[0892] g) a CRISPR repeat having at least 100% sequence identity to SEQ ID NO: 27 or nucleotides 1-22 of SEQ ID NO: 1044 or 1045, wherein said tracrRNA has at least 100% sequence identity to SEQ ID NO: 48 or nucleotides 27-96 of SEQ ID NO 1044 or nucleotides 27-95 of SEQ ID NO: 1045;
[0893] h) a CRISPR repeat having at least 100% sequence identity to SEQ ID NO: 28, wherein said tracrRNA has at least 100% sequence identity to SEQ ID NO: 49;
[0894] i) a CRISPR repeat having at least 100% sequence identity to SEQ ID NO: 29, wherein said tracrRNA has at least 100% sequence identity to SEQ ID NO: 50;
[0895] j) a CRISPR repeat having at least 100% sequence identity to SEQ ID NO: 30, wherein said tracrRNA has at least 100% sequence identity to SEQ ID NO: 51;
[0896] k) a CRISPR repeat having at least 100% sequence identity to SEQ ID NO: 31, wherein said tracrRNA has at least 100% sequence identity to SEQ ID NO: 52;
[0897] l) a CRISPR repeat having at least 100% sequence identity to SEQ ID NO: 32, wherein said tracrRNA has at least 100% sequence identity to SEQ ID NO: 53;
[0898] m) a CRISPR repeat having at least 100% sequence identity to SEQ ID NO: 33, wherein said tracrRNA has at least 100% sequence identity to SEQ ID NO: 54;
[0899] n) a CRISPR repeat having at least 100% sequence identity to SEQ ID NO: 34, wherein said tracrRNA has at least 100% sequence identity to SEQ ID NO: 55;
[0900] o) a CRISPR repeat having at least 100% sequence identity to SEQ ID NO: 35, wherein said tracrRNA has at least 100% sequence identity to SEQ ID NO: 56;
[0901] p) a CRISPR repeat having at least 100% sequence identity to SEQ ID NO: 36, wherein said tracrRNA has at least 100% sequence identity to SEQ ID NO: 57;
[0902] q) a CRISPR repeat having at least 100% sequence identity to SEQ ID NO: 37, wherein said tracrRNA has at least 100% sequence identity to SEQ ID NO: 58;
[0903] r) a CRISPR repeat having at least 100% sequence identity to SEQ ID NO: 38 or 39, wherein said tracrRNA has at least 100% sequence identity to SEQ ID NO: 59 or 60;
[0904] s) a CRISPR repeat having at least 100% sequence identity to SEQ ID NO: 40, wherein said tracrRNA has at least 100% sequence identity to SEQ ID NO: 61; and
[0905] t) a CRISPR repeat having at least 100% sequence identity to SEQ ID NO: 41, wherein said tracrRNA has at least 100% sequence identity to SEQ ID NO: 62.

[0906] 89. The vector of any one of embodiments 85-88, wherein said polynucleotide encoding said crRNA and said polynucleotide encoding said tracrRNA are operably linked to the same promoter and are encoded as a single guide RNA.

[0907] 90. The vector of any one of embodiments 85-88, wherein said polynucleotide encoding said crRNA and said polynucleotide encoding said tracrRNA are operably linked to separate promoters.

[0908] 91. The vector of any one of embodiments 85-90, wherein said vector further comprises a polynucleotide encoding said RGN polypeptide.

[0909] 92. The vector of embodiment 91, wherein said RGN polypeptide is selected from the group consisting of:
[0910] a) a RGN polypeptide having at least 90% sequence identity to SEQ ID NO: 1, wherein said crRNA comprises a CRISPR repeat having at least 90% sequence identity to SEQ ID NO: 21 and said tracrRNA has at least 90% sequence identity to SEQ ID NO: 42;
[0911] b) a RGN polypeptide having at least 90% sequence identity to SEQ ID NO: 2, wherein said crRNA comprises a CRISPR repeat having at least 90% sequence identity to SEQ ID NO: 22 and said tracrRNA has at least 90% sequence identity to SEQ ID NO: 43;
[0912] c) a RGN polypeptide having at least 90% sequence identity to SEQ ID NO: 3, wherein said crRNA comprises a CRISPR repeat having at least 90% sequence identity to SEQ ID NO: 23 and said tracrRNA has at least 90% sequence identity to SEQ ID NO: 44 or nucleotides 19-111 of SEQ ID NO: 1040;
[0913] d) a RGN polypeptide having at least 90% sequence identity to SEQ ID NO: 4, wherein said crRNA comprises a CRISPR repeat having at least 90% sequence identity to SEQ ID NO: 24 and said tracrRNA has at least 90% sequence identity to SEQ ID NO: 45;
[0914] e) a RGN polypeptide having at least 90% sequence identity to SEQ ID NO: 5, wherein said crRNA comprises a CRISPR repeat having at least 90% sequence identity to SEQ ID NO: 25 or nucleotides 1-17 of SEQ ID NO: 1041 or 1042, and said tracrRNA has at least 90% sequence identity to SEQ ID NO: 46 or nucleotides 22-85 of SEQ ID NO: 1041 or 1042;
[0915] f) a RGN polypeptide having at least 90% sequence identity to SEQ ID NO: 6, wherein said crRNA comprises a CRISPR repeat having at least 90% sequence identity to SEQ ID NO: 26 and said tracrRNA has at least 90% sequence identity to SEQ ID NO: 47 or nucleotides 24-138 of SEQ ID NO: 1043;
[0916] g) a RGN polypeptide having at least 90% sequence identity to SEQ ID NO: 7, wherein said crRNA comprises a CRISPR repeat having at least 90% sequence identity to SEQ ID NO: 27 or nucleotides 1-22 of SEQ ID NO: 1044 or 1045, and said tracrRNA has at least 90% sequence identity to SEQ ID NO: 48 or nucleotides 27-96 of SEQ ID NO 1044 or nucleotides 27-95 of SEQ ID NO: 1045;
[0917] h) a RGN polypeptide having at least 90% sequence identity to SEQ ID NO: 8, wherein said crRNA comprises a CRISPR repeat having at least 90% sequence identity to SEQ ID NO: 28 and said tracrRNA has at least 90% sequence identity to SEQ ID NO: 49;
[0918] i) a RGN polypeptide having at least 90% sequence identity to SEQ ID NO: 9, wherein said crRNA comprises a CRISPR repeat having at least 90% sequence identity to SEQ ID NO: 29 and said tracrRNA has at least 90% sequence identity to SEQ ID NO: 50;
[0919] j) a RGN polypeptide having at least 90% sequence identity to SEQ ID NO: 10, wherein said crRNA comprises a CRISPR repeat having at least 90% sequence identity to SEQ ID NO: 30 and said tracrRNA has at least 90% sequence identity to SEQ ID NO: 51;
[0920] k) a RGN polypeptide having at least 90% sequence identity to SEQ ID NO: 11, wherein said crRNA comprises a CRISPR repeat having at least 90% sequence identity to SEQ ID NO: 31 and said tracrRNA has at least 90% sequence identity to SEQ ID NO: 52;
[0921] l) a RGN polypeptide having at least 90% sequence identity to SEQ ID NO: 12, wherein said crRNA comprises a CRISPR repeat having at least 90% sequence identity to SEQ ID NO: 32 and said tracrRNA has at least 90% sequence identity to SEQ ID NO: 53;
[0922] m) a RGN polypeptide having at least 90% sequence identity to SEQ ID NO: 13, wherein said crRNA comprises a CRISPR repeat having at least 90% sequence identity to SEQ ID NO: 33 and said tracrRNA has at least 90% sequence identity to SEQ ID NO: 54;
[0923] n) a RGN polypeptide having at least 90% sequence identity to SEQ ID NO: 14, wherein said crRNA comprises a CRISPR repeat having at least 90% sequence identity to SEQ ID NO: 34 and said tracrRNA has at least 90% sequence identity to SEQ ID NO: 55;
[0924] o) a RGN polypeptide having at least 90% sequence identity to SEQ ID NO: 15, wherein said crRNA comprises a CRISPR repeat having at least 90% sequence identity to SEQ ID NO: 35 and said tracrRNA has at least 90% sequence identity to SEQ ID NO: 56;
[0925] p) a RGN polypeptide having at least 90% sequence identity to SEQ ID NO: 16, wherein said crRNA comprises a CRISPR repeat having at least 90% sequence identity to SEQ ID NO: 36 and said tracrRNA has at least 90% sequence identity to SEQ ID NO: 57;
[0926] q) a RGN polypeptide having at least 90% sequence identity to SEQ ID NO: 17, wherein said crRNA comprises a CRISPR repeat having at least 90% sequence identity to SEQ ID NO: 37 and said tracrRNA has at least 90% sequence identity to SEQ ID NO: 58;
[0927] r) a RGN polypeptide having at least 90% sequence identity to SEQ ID NO: 18, wherein said crRNA comprises a CRISPR repeat having at least 90% sequence identity to SEQ ID NO: 38, or 39 and said tracrRNA has at least 90% sequence identity to SEQ ID NO: 59 or 60;
[0928] s) a RGN polypeptide having at least 90% sequence identity to SEQ ID NO: 19, wherein said crRNA comprises a CRISPR repeat having at least 90% sequence identity to SEQ ID NO: 40 and said tracrRNA has at least 90% sequence identity to SEQ ID NO: 61; and
[0929] t) a RGN polypeptide having at least 90% sequence identity to SEQ ID NO: 20, wherein said crRNA comprises a CRISPR repeat having at least 90% sequence identity to SEQ ID NO: 41 and said tracrRNA has at least 90% sequence identity to SEQ ID NO: 62.

[0930] 93. The vector of embodiment 91, wherein said RGN polypeptide is selected from the group consisting of:
[0931] a) a RGN polypeptide having at least 95% sequence identity to SEQ ID NO: 1, wherein said crRNA comprises a CRISPR repeat having at least 95% sequence identity to SEQ ID NO: 21 and said tracrRNA has at least 95% sequence identity to SEQ ID NO: 42;
[0932] b) a RGN polypeptide having at least 95% sequence identity to SEQ ID NO: 2, wherein said crRNA comprises a CRISPR repeat having at least 95% sequence identity to SEQ ID NO: 22 and said tracrRNA has at least 95% sequence identity to SEQ ID NO: 43;
[0933] c) a RGN polypeptide having at least 95% sequence identity to SEQ ID NO: 3, wherein said crRNA comprises a CRISPR repeat having at least 95% sequence identity to SEQ ID NO: 23 and said tracrRNA has at least 95% sequence identity to SEQ ID NO: 44 or nucleotides 19-111 of SEQ ID NO: 1040;
[0934] d) a RGN polypeptide having at least 95% sequence identity to SEQ ID NO: 4, wherein said crRNA comprises a CRISPR repeat having at least 95% sequence identity to SEQ ID NO: 24 and said tracrRNA has at least 95% sequence identity to SEQ ID NO: 45;
[0935] e) a RGN polypeptide having at least 95% sequence identity to SEQ ID NO: 5, wherein said crRNA comprises a CRISPR repeat having at least 95% sequence identity to SEQ ID NO: 25 or nucleotides 1-17 of SEQ ID NO: 1041 or 1042, and said tracrRNA has at least 95% sequence identity to SEQ ID NO: 46 or nucleotides 22-85 of SEQ ID NO: 1041 or 1042;
[0936] f) a RGN polypeptide having at least 95% sequence identity to SEQ ID NO: 6, wherein said crRNA comprises a CRISPR repeat having at least 95% sequence identity to SEQ ID NO: 26 and said tracrRNA has at least 95% sequence identity to SEQ ID NO: 47 or nucleotides 24-138 of SEQ ID NO: 1043;
[0937] g) a RGN polypeptide having at least 95% sequence identity to SEQ ID NO: 7, wherein said crRNA comprises a CRISPR repeat having at least 95% sequence identity to SEQ ID NO: 27 or nucleotides 1-22 of SEQ ID NO: 1044 or 1045, and said tracrRNA has at least 95% sequence identity to SEQ ID NO: 48 or nucleotides 27-96 of SEQ ID NO 1044 or nucleotides 27-95 of SEQ ID NO: 1045;
[0938] h) a RGN polypeptide having at least 95% sequence identity to SEQ ID NO: 8, wherein said crRNA comprises a CRISPR repeat having at least 95% sequence identity to SEQ ID NO: 28 and said tracrRNA has at least 95% sequence identity to SEQ ID NO: 49;
[0939] i) a RGN polypeptide having at least 95% sequence identity to SEQ ID NO: 9, wherein said crRNA comprises a CRISPR repeat having at least 95% sequence identity to SEQ ID NO: 29 and said tracrRNA has at least 95% sequence identity to SEQ ID NO: 50;
[0940] j) a RGN polypeptide having at least 95% sequence identity to SEQ ID NO: 10, wherein said crRNA comprises a CRISPR repeat having at least 95% sequence identity to SEQ ID NO: 30 and said tracrRNA has at least 95% sequence identity to SEQ ID NO: 51;
[0941] k) a RGN polypeptide having at least 95% sequence identity to SEQ ID NO: 11, wherein said crRNA comprises a CRISPR repeat having at least 95% sequence identity to SEQ ID NO: 31 and said tracrRNA has at least 95% sequence identity to SEQ ID NO: 52;
[0942] l) a RGN polypeptide having at least 95% sequence identity to SEQ ID NO: 12, wherein said crRNA comprises a CRISPR repeat having at least 95% sequence identity to SEQ ID NO: 32 and said tracrRNA has at least 95% sequence identity to SEQ ID NO: 53;
[0943] m) a RGN polypeptide having at least 95% sequence identity to SEQ ID NO: 13, wherein said crRNA comprises a CRISPR repeat having at least 95% sequence identity to SEQ ID NO: 33 and said tracrRNA has at least 95% sequence identity to SEQ ID NO: 54;
[0944] n) a RGN polypeptide having at least 95% sequence identity to SEQ ID NO: 14, wherein said crRNA comprises a CRISPR repeat having at least 95% sequence identity to SEQ ID NO: 34 and said tracrRNA has at least 95% sequence identity to SEQ ID NO: 55;
[0945] o) a RGN polypeptide having at least 95% sequence identity to SEQ ID NO: 15, wherein said crRNA comprises a CRISPR repeat having at least 95% sequence identity to SEQ ID NO: 35 and said tracrRNA has at least 95% sequence identity to SEQ ID NO: 56;
[0946] p) a RGN polypeptide having at least 95% sequence identity to SEQ ID NO: 16, wherein said crRNA comprises a CRISPR repeat having at least 95% sequence identity to SEQ ID NO: 36 and said tracrRNA has at least 95% sequence identity to SEQ ID NO: 57;
[0947] q) a RGN polypeptide having at least 95% sequence identity to SEQ ID NO: 17, wherein said crRNA comprises a CRISPR repeat having at least 95% sequence identity to SEQ ID NO: 37 and said tracrRNA has at least 95% sequence identity to SEQ ID NO: 58;
[0948] r) a RGN polypeptide having at least 95% sequence identity to SEQ ID NO: 18, wherein said crRNA comprises a CRISPR repeat having at least 95% sequence identity to SEQ ID NO: 38, or 39 and said tracrRNA has at least 95% sequence identity to SEQ ID NO: 59 or 60;
[0949] s) a RGN polypeptide having at least 95% sequence identity to SEQ ID NO: 19, wherein said crRNA comprises a CRISPR repeat having at least 95% sequence identity to SEQ ID NO: 40 and said tracrRNA has at least 95% sequence identity to SEQ ID NO: 61; and
[0950] t) a RGN polypeptide having at least 95% sequence identity to SEQ ID NO: 20, wherein said crRNA comprises a CRISPR repeat having at least 95% sequence identity to SEQ ID NO: 41 and said tracrRNA has at least 95% sequence identity to SEQ ID NO: 62.

[0951] 94. The vector of embodiment 91, wherein said RGN polypeptide is selected from the group consisting of:
[0952] a) a RGN polypeptide having at least 100% sequence identity to SEQ ID NO: 1, wherein said crRNA comprises a CRISPR repeat having at least 100% sequence identity to SEQ ID NO: 21 and said tracrRNA has at least 100% sequence identity to SEQ ID NO: 42;
[0953] b) a RGN polypeptide having at least 100% sequence identity to SEQ ID NO: 2, wherein said crRNA comprises a CRISPR repeat having at least 100% sequence identity to SEQ ID NO: 22 and said tracrRNA has at least 100% sequence identity to SEQ ID NO: 43;
[0954] c) a RGN polypeptide having at least 100% sequence identity to SEQ ID NO: 3, wherein said crRNA comprises a CRISPR repeat having at least 100% sequence identity to SEQ ID NO: 23 and said tracrRNA has at least 100% sequence identity to SEQ ID NO: 44 or nucleotides 19-111 of SEQ ID NO: 1040;
[0955] d) a RGN polypeptide having at least 100% sequence identity to SEQ ID NO: 4, wherein said crRNA comprises a CRISPR repeat having at least 100% sequence identity to SEQ ID NO: 24 and said tracrRNA has at least 100% sequence identity to SEQ ID NO: 45;
[0956] e) a RGN polypeptide having at least 100% sequence identity to SEQ ID NO: 5, wherein said crRNA comprises a CRISPR repeat having at least 100% sequence identity to SEQ ID NO: 25 or nucleotides 1-17 of SEQ ID NO: 1041 or 1042, and said tracrRNA has at least 100% sequence identity to SEQ ID NO: 46 or nucleotides 22-85 of SEQ ID NO: 1041 or 1042;
[0957] f) a RGN polypeptide having at least 100% sequence identity to SEQ ID NO: 6, wherein said crRNA comprises a CRISPR repeat having at least 100% sequence identity to SEQ ID NO: 26 and said tracrRNA has at least 100% sequence identity to SEQ ID NO: 47 or nucleotides 24-138 of SEQ ID NO: 1043;
[0958] g) a RGN polypeptide having at least 100% sequence identity to SEQ ID NO: 7, wherein said crRNA comprises a CRISPR repeat having at least 100% sequence identity to SEQ ID NO: 27 or nucleotides 1-22 of SEQ ID NO: 1044 or 1045, and said tracrRNA has at least 100% sequence identity to SEQ ID NO: 48 or nucleotides 27-96 of SEQ ID NO 1044 or nucleotides 27-95 of SEQ ID NO: 1045;
[0959] h) a RGN polypeptide having at least 100% sequence identity to SEQ ID NO: 8, wherein said crRNA comprises a CRISPR repeat having at least 100% sequence identity to SEQ ID NO: 28 and said tracrRNA has at least 100% sequence identity to SEQ ID NO: 49;
[0960] i) a RGN polypeptide having at least 100% sequence identity to SEQ ID NO: 9, wherein said crRNA comprises a CRISPR repeat having at least 100% sequence identity to SEQ ID NO: 29 and said tracrRNA has at least 100% sequence identity to SEQ ID NO: 50;
[0961] j) a RGN polypeptide having at least 100% sequence identity to SEQ ID NO: 10, wherein said crRNA comprises a CRISPR repeat having at least 100% sequence identity to SEQ ID NO: 30 and said tracrRNA has at least 100% sequence identity to SEQ ID NO: 51;
[0962] k) a RGN polypeptide having at least 100% sequence identity to SEQ ID NO: 11, wherein said crRNA comprises a CRISPR repeat having at least 100% sequence identity to SEQ ID NO: 31 and said tracrRNA has at least 100% sequence identity to SEQ ID NO: 52;
[0963] l) a RGN polypeptide having at least 100% sequence identity to SEQ ID NO: 12, wherein said crRNA comprises a CRISPR repeat having at least 100% sequence identity to SEQ ID NO: 32 and said tracrRNA has at least 100% sequence identity to SEQ ID NO: 53;
[0964] m) a RGN polypeptide having at least 100% sequence identity to SEQ ID NO: 13, wherein said crRNA comprises a CRISPR repeat having at least 100% sequence identity to SEQ ID NO: 33 and said tracrRNA has at least 100% sequence identity to SEQ ID NO: 54;
[0965] n) a RGN polypeptide having at least 100% sequence identity to SEQ ID NO: 14, wherein said crRNA comprises a CRISPR repeat having at least 100% sequence identity to SEQ ID NO: 34 and said tracrRNA has at least 100% sequence identity to SEQ ID NO: 55;
[0966] o) a RGN polypeptide having at least 100% sequence identity to SEQ ID NO: 15, wherein said crRNA comprises a CRISPR repeat having at least 100% sequence identity to SEQ ID NO: 35 and said tracrRNA has at least 100% sequence identity to SEQ ID NO: 56;
[0967] p) a RGN polypeptide having at least 100% sequence identity to SEQ ID NO: 16, wherein said crRNA comprises a CRISPR repeat having at least 100% sequence identity to SEQ ID NO: 36 and said tracrRNA has at least 100% sequence identity to SEQ ID NO: 57;
[0968] q) a RGN polypeptide having at least 100% sequence identity to SEQ ID NO: 17, wherein said crRNA comprises a CRISPR repeat having at least 100% sequence identity to SEQ ID NO: 37 and said tracrRNA has at least 100% sequence identity to SEQ ID NO: 58;
[0969] r) a RGN polypeptide having at least 100% sequence identity to SEQ ID NO: 18, wherein said crRNA comprises a CRISPR repeat having at least 100% sequence identity to SEQ ID NO: 38, or 39 and said tracrRNA has at least 100% sequence identity to SEQ ID NO: 59 or 60;
[0970] s) a RGN polypeptide having at least 100% sequence identity to SEQ ID NO: 19, wherein said crRNA comprises a CRISPR repeat having at least 100% sequence identity to SEQ ID NO: 40 and said tracrRNA has at least 100% sequence identity to SEQ ID NO: 61; and
[0971] t) a RGN polypeptide having at least 100% sequence identity to SEQ ID NO: 20, wherein said crRNA comprises a CRISPR repeat having at least 100% sequence identity to SEQ ID NO: 41 and said tracrRNA has at least 100% sequence identity to SEQ ID NO: 62.

[0972] 95. A cell comprising the nucleic acid molecule of any one of embodiments 63-67 and 79-83, the vector of any one of embodiments 68-78 and 84-94, the single guide RNA of embodiment 254, or the double guide RNA of embodiment 255.

[0973] 96. The cell of embodiment 95, wherein the cell is a prokaryotic cell.

[0974] 97. The cell of embodiment 95, wherein the cell is a eukaryotic cell.

[0975] 98. The cell of embodiment 97, wherein the eukaryotic cell is a mammalian cell.

[0976] 99. The cell of embodiment 98, wherein the mammalian cell is a human cell.

[0977] 100. The cell of embodiment 99, wherein the human cell is an immune cell.

[0978] 101. The cell of embodiment 100, wherein the immune cell is a stem cell.

[0979] 102. The cell of embodiment 101, wherein the stem cell is an induced pluripotent stem cell.

[0980] 103. The cell of embodiment 97, wherein the eukaryotic cell is an insect or avian cell.

[0981] 104. The cell of embodiment 97, wherein the eukaryotic cell is a fungal cell.

[0982] 105. The cell of embodiment 97, wherein the eukaryotic cell is a plant cell.

[0983] 106. A plant comprising the cell of embodiment 105.

[0984] 107. A seed comprising the cell of embodiment 105.

[0985] 108. A system for binding a target sequence in a target nucleic acid molecule, wherein said target sequence comprises a target strand and a non-target strand, said system comprising:
[0986] a) one or more guide RNAs capable of hybridizing to the non-target strand of said target sequence or one or more polynucleotides comprising one or more nucleotide sequences encoding the one or more guide RNAs (gRNAs); and
[0987] b) an RNA-guided nuclease (RGN) polypeptide comprising an amino acid sequence having at least 90% sequence identity to any one of SEQ ID NOs: 1-20 or a polynucleotide comprising a nucleotide sequence encoding the RGN polypeptide;
[0988] wherein the one or more guide RNAs are capable of forming a complex with the RGN polypeptide in order to direct said RGN polypeptide to bind to said target sequence.

[0989] 109. The system of embodiment 108, wherein at least one of said nucleotide sequences encoding the one or more guide RNAs and said nucleotide sequence encoding the RGN polypeptide is operably linked to a promoter heterologous to said nucleotide sequence.

[0990] 110. A system for binding a target sequence in a target nucleic acid molecule, wherein said target sequence comprises a target strand and a non-target strand, said system comprising:
[0991] a) one or more guide RNAs capable of hybridizing to the non-target strand of said target sequence or one or more polynucleotides comprising one or more nucleotide sequences encoding the one or more guide RNAs (gRNAs); and
[0992] b) an RNA-guided nuclease (RGN) polypeptide comprising an amino acid sequence having at least 90% sequence identity to any one of SEQ ID NOs: 1-20;
[0993] wherein the one or more guide RNAs are capable of forming a complex with the RGN polypeptide in order to direct said RGN polypeptide to bind to said target sequence.

[0994] 111. The system of any one of embodiments 108-110, wherein at least one of said nucleotides sequences encoding the one or more guide RNAs is operably linked to a promoter heterologous to said nucleotide sequence.

[0995] 112. The system of any one of embodiments 108-111, wherein said RGN polypeptide comprises an amino acid sequence having at least 95% sequence identity to any one of SEQ ID NOs: 1-20.

[0996] 113. The system of any one of embodiments 108-111, wherein said RGN polypeptide comprises an amino acid sequence having 100% sequence identity to any one of SEQ ID NOs: 1-20.

[0997] 114. The system of any one of embodiments 108-113, wherein said RGN polypeptide and said one or more guide RNAs are not found complexed to one another in nature.

[0998] 115. The system of any one of embodiments 108-114, wherein said target sequence is a eukaryotic target sequence.

[0999] 116. The system of any one of embodiments 108-115, wherein said gRNA is a single guide RNA (sgRNA).

[1000] 117. The system of any one of embodiments 108-115, wherein said gRNA is a dual-guide RNA.

[1001] 118. The system of any one of embodiments 108-117, wherein said gRNA is selected from the group consisting of:
[1002] a) a gRNA comprising a CRISPR repeat having at least 90% sequence identity to SEQ ID NO: 21 and a tracrRNA having at least 90% sequence identity to SEQ ID NO: 42, wherein said RGN polypeptide comprises an amino acid sequence having at least 90% sequence identity to SEQ ID NO: 1;
[1003] b) a gRNA comprising a CRISPR repeat having at least 90% sequence identity to SEQ ID NO: 22 and a tracrRNA having at least 90% sequence identity to SEQ ID NO: 43, wherein said RGN polypeptide comprises an amino acid sequence having at least 90% sequence identity to SEQ ID NO: 2;
[1004] c) a gRNA comprising a CRISPR repeat having at least 90% sequence identity to SEQ ID NO: 23 and a tracrRNA having at least 90% sequence identity to SEQ ID NO: 44 or nucleotides 19-111 of SEQ ID NO: 1040, wherein said RGN polypeptide comprises an amino acid sequence having at least 90% sequence identity to SEQ ID NO: 3;
[1005] d) a gRNA comprising a CRISPR repeat having at least 90% sequence identity to SEQ ID NO: 24 and a tracrRNA having at least 90% sequence identity to SEQ ID NO: 45, wherein said RGN polypeptide comprises an amino acid sequence having at least 90% sequence identity to SEQ ID NO: 4;
[1006] e) a gRNA comprising a CRISPR repeat having at least 90% sequence identity to SEQ ID NO: 25 or nucleotides 1-17 of SEQ ID NO: 1041 or 1042, and a tracrRNA having at least 90% sequence identity to SEQ ID NO: 46 or nucleotides 22-85 of SEQ ID NO: 1041 or 1042, wherein said RGN polypeptide comprises an amino acid sequence having at least 90% sequence identity to SEQ ID NO: 5;
[1007] f) a gRNA comprising a CRISPR repeat having at least 90% sequence identity to SEQ ID NO: 26 and a tracrRNA having at least 90% sequence identity to SEQ ID NO: 47 or nucleotides 24-138 of SEQ ID NO: 1043, wherein said RGN polypeptide comprises an amino acid sequence having at least 90% sequence identity to SEQ ID NO: 6;
[1008] g) a gRNA comprising a CRISPR repeat having at least 90% sequence identity to SEQ ID NO: 27 or nucleotides 1-22 of SEQ ID NO: 1044 or 1045, and a tracrRNA having at least 90% sequence identity to SEQ ID NO: 48 or nucleotides 27-96 of SEQ ID NO 1044 or nucleotides 27-95 of SEQ ID NO: 1045, wherein said RGN polypeptide comprises an amino acid sequence having at least 90% sequence identity to SEQ ID NO: 7;
[1009] h) a gRNA comprising a CRISPR repeat having at least 90% sequence identity to SEQ ID NO: 28 and a tracrRNA having at least 90% sequence identity to SEQ ID NO: 49, wherein said RGN polypeptide comprises an amino acid sequence having at least 90% sequence identity to SEQ ID NO: 8;
[1010] i) a gRNA comprising a CRISPR repeat having at least 90% sequence identity to SEQ ID NO: 29 and a tracrRNA having at least 90% sequence identity to SEQ ID NO: 50, wherein said RGN polypeptide comprises an amino acid sequence having at least 90% sequence identity to SEQ ID NO: 9;
[1011] j) a gRNA comprising a CRISPR repeat having at least 90% sequence identity to SEQ ID NO: 30 and a tracrRNA having at least 90% sequence identity to SEQ ID NO: 51, wherein said RGN polypeptide comprises an amino acid sequence having at least 90% sequence identity to SEQ ID NOs:10;
[1012] k) a gRNA comprising a CRISPR repeat having at least 90% sequence identity to SEQ ID NO: 31 and a tracrRNA having at least 90% sequence identity to SEQ ID NO: 52, wherein said RGN polypeptide comprises an amino acid sequence having at least 90% sequence identity to SEQ ID NO: 11;
[1013] l) a gRNA comprising a CRISPR repeat having at least 90% sequence identity to SEQ ID NO: 32 and a tracrRNA having at least 90% sequence identity to SEQ ID NO: 53, wherein said RGN polypeptide comprises an amino acid sequence having at least 90% sequence identity to SEQ ID NO: 12;
[1014] m) a gRNA comprising a CRISPR repeat having at least 90% sequence identity to SEQ ID NO: 33 and a tracrRNA having at least 90% sequence identity to SEQ ID NO: 54, wherein said RGN polypeptide comprises an amino acid sequence having at least 90% sequence identity to SEQ ID NO: 13;
[1015] n) a gRNA comprising a CRISPR repeat having at least 90% sequence identity to SEQ ID NO: 34 and a tracrRNA having at least 90% sequence identity to SEQ ID NO: 55, wherein said RGN polypeptide comprises an amino acid sequence having at least 90% sequence identity to SEQ ID NO: 14;
[1016] o) a gRNA comprising a CRISPR repeat having at least 90% sequence identity to SEQ ID NO: 35 and a tracrRNA having at least 90% sequence identity to SEQ ID NO: 56, wherein said RGN polypeptide comprises an amino acid sequence having at least 90% sequence identity to SEQ ID NO: 15;
[1017] p) a gRNA comprising a CRISPR repeat having at least 90% sequence identity to SEQ ID NO: 36 and a tracrRNA having at least 90% sequence identity to SEQ ID NO: 57, wherein said RGN polypeptide comprises an amino acid sequence having at least 90% sequence identity to SEQ ID NO: 16;
[1018] q) a gRNA comprising a CRISPR repeat having at least 90% sequence identity to SEQ ID NO: 37 and a tracrRNA having at least 90% sequence identity to SEQ ID NO: 58, wherein said RGN polypeptide comprises an amino acid sequence having at least 90% sequence identity to SEQ ID NO: 17;
[1019] r) a gRNA comprising a CRISPR repeat having at least 90% sequence identity to SEQ ID NO: 38 or 39 and a tracrRNA having at least 90% sequence identity to SEQ ID NO: 59 or 60, wherein said RGN polypeptide comprises an amino acid sequence having at least 90% sequence identity to SEQ ID NO: 18;
[1020] s) a gRNA comprising a CRISPR repeat having at least 90% sequence identity to SEQ ID NO: 40 and a tracrRNA having at least 90% sequence identity to SEQ ID NO: 61, wherein said RGN polypeptide comprises an amino acid sequence having at least 90% sequence identity to SEQ ID NO: 19; and
[1021] t) a gRNA comprising a CRISPR repeat having at least 90% sequence identity to SEQ ID NO: 41 and a tracrRNA having at least 90% sequence identity to SEQ ID NO: 62, wherein said RGN polypeptide comprises an amino acid sequence having at least 90% sequence identity to SEQ ID NO: 20.

[1022] 119. The system of any one of embodiments 108-117, wherein said gRNA is selected from the group consisting of:
[1023] a) a gRNA comprising a CRISPR repeat having at least 95% sequence identity to SEQ ID NO: 21 and a tracrRNA having at least 95% sequence identity to SEQ ID NO: 42, wherein said RGN polypeptide comprises an amino acid sequence having at least 95% sequence identity to SEQ ID NO: 1;
[1024] b) a gRNA comprising a CRISPR repeat having at least 95% sequence identity to SEQ ID NO: 22 and a tracrRNA having at least 95% sequence identity to SEQ ID NO: 43, wherein said RGN polypeptide comprises an amino acid sequence having at least 95% sequence identity to SEQ ID NO: 2;
[1025] c) a gRNA comprising a CRISPR repeat having at least 95% sequence identity to SEQ ID NO: 23 and a tracrRNA having at least 95% sequence identity to SEQ ID NO: 44 or nucleotides 19-111 of SEQ ID NO: 1040, wherein said RGN polypeptide comprises an amino acid sequence having at least 95% sequence identity to SEQ ID NO: 3;
[1026] d) a gRNA comprising a CRISPR repeat having at least 95% sequence identity to SEQ ID NO: 24 and a tracrRNA having at least 95% sequence identity to SEQ ID NO: 45, wherein said RGN polypeptide comprises an amino acid sequence having at least 95% sequence identity to SEQ ID NO: 4;
[1027] e) a gRNA comprising a CRISPR repeat having at least 95% sequence identity to SEQ ID NO: 25 or nucleotides 1-17 of SEQ ID NO: 1041 or 1042, and a tracrRNA having at least 95% sequence identity to SEQ ID NO: 46 or nucleotides 22-85 of SEQ ID NO: 1041 or 1042, wherein said RGN polypeptide comprises an amino acid sequence having at least 95% sequence identity to SEQ ID NO: 5;
[1028] f) a gRNA comprising a CRISPR repeat having at least 95% sequence identity to SEQ ID NO: 26 and a tracrRNA having at least 95% sequence identity to SEQ ID NO: 47 or nucleotides 24-138 of SEQ ID NO: 1043, wherein said RGN polypeptide comprises an amino acid sequence having at least 95% sequence identity to SEQ ID NO: 6;
[1029] g) a gRNA comprising a CRISPR repeat having at least 95% sequence identity to SEQ ID NO: 27 or nucleotides 1-22 of SEQ ID NO: 1044 or 1045, and a tracrRNA having at least 95% sequence identity to SEQ ID NO: 48 or nucleotides 27-96 of SEQ ID NO 1044 or nucleotides 27-95 of SEQ ID NO: 1045, wherein said RGN polypeptide comprises an amino acid sequence having at least 95% sequence identity to SEQ ID NO: 7;
[1030] h) a gRNA comprising a CRISPR repeat having at least 95% sequence identity to SEQ ID NO: 28 and a tracrRNA having at least 95% sequence identity to SEQ ID NO: 49, wherein said RGN polypeptide comprises an amino acid sequence having at least 95% sequence identity to SEQ ID NO: 8;
[1031] i) a gRNA comprising a CRISPR repeat having at least 95% sequence identity to SEQ ID NO: 29 and a tracrRNA having at least 95% sequence identity to SEQ ID NO: 50, wherein said RGN polypeptide comprises an amino acid sequence having at least 95% sequence identity to SEQ ID NO: 9;
[1032] j) a gRNA comprising a CRISPR repeat having at least 95% sequence identity to SEQ ID NO: 30 and a tracrRNA having at least 95% sequence identity to SEQ ID NO: 51, wherein said RGN polypeptide comprises an amino acid sequence having at least 95% sequence identity to SEQ ID NOs:10;
[1033] k) a gRNA comprising a CRISPR repeat having at least 95% sequence identity to SEQ ID NO: 31 and a tracrRNA having at least 95% sequence identity to SEQ ID NO: 52, wherein said RGN polypeptide comprises an amino acid sequence having at least 95% sequence identity to SEQ ID NO: 11;

[1034] l) a gRNA comprising a CRISPR repeat having at least 95% sequence identity to SEQ ID NO: 32 and a tracrRNA having at least 95% sequence identity to SEQ ID NO: 53, wherein said RGN polypeptide comprises an amino acid sequence having at least 95% sequence identity to SEQ ID NO: 12;
[1035] m) a gRNA comprising a CRISPR repeat having at least 95% sequence identity to SEQ ID NO: 33 and a tracrRNA having at least 95% sequence identity to SEQ ID NO: 54, wherein said RGN polypeptide comprises an amino acid sequence having at least 95% sequence identity to SEQ ID NO: 13;
[1036] n) a gRNA comprising a CRISPR repeat having at least 95% sequence identity to SEQ ID NO: 34 and a tracrRNA having at least 95% sequence identity to SEQ ID NO: 55, wherein said RGN polypeptide comprises an amino acid sequence having at least 95% sequence identity to SEQ ID NO: 14;
[1037] o) a gRNA comprising a CRISPR repeat having at least 95% sequence identity to SEQ ID NO: 35 and a tracrRNA having at least 95% sequence identity to SEQ ID NO: 56, wherein said RGN polypeptide comprises an amino acid sequence having at least 95% sequence identity to SEQ ID NO: 15;
[1038] p) a gRNA comprising a CRISPR repeat having at least 95% sequence identity to SEQ ID NO: 36 and a tracrRNA having at least 95% sequence identity to SEQ ID NO: 57, wherein said RGN polypeptide comprises an amino acid sequence having at least 95% sequence identity to SEQ ID NO: 16;
[1039] q) a gRNA comprising a CRISPR repeat having at least 95% sequence identity to SEQ ID NO: 37 and a tracrRNA having at least 95% sequence identity to SEQ ID NO: 58, wherein said RGN polypeptide comprises an amino acid sequence having at least 95% sequence identity to SEQ ID NO: 17;
[1040] r) a gRNA comprising a CRISPR repeat having at least 95% sequence identity to SEQ ID NO: 38 or 39 and a tracrRNA having at least 95% sequence identity to SEQ ID NO: 59 or 60, wherein said RGN polypeptide comprises an amino acid sequence having at least 95% sequence identity to SEQ ID NO: 18;
[1041] s) a gRNA comprising a CRISPR repeat having at least 95% sequence identity to SEQ ID NO: 40 and a tracrRNA having at least 95% sequence identity to SEQ ID NO: 61, wherein said RGN polypeptide comprises an amino acid sequence having at least 95% sequence identity to SEQ ID NO: 19; and
[1042] t) a gRNA comprising a CRISPR repeat having at least 95% sequence identity to SEQ ID NO: 41 and a tracrRNA having at least 95% sequence identity to SEQ ID NO: 62, wherein said RGN polypeptide comprises an amino acid sequence having at least 95% sequence identity to SEQ ID NO: 20.

[1043] 120. The system of any one of embodiments 108-117, wherein said gRNA is selected from the group consisting of:
[1044] a) a gRNA comprising a CRISPR repeat having at least 100% sequence identity to SEQ ID NO: 21 and a tracrRNA having at least 100% sequence identity to SEQ ID NO: 42, wherein said RGN polypeptide comprises an amino acid sequence having at least 100% sequence identity to SEQ ID NO: 1;
[1045] b) a gRNA comprising a CRISPR repeat having at least 100% sequence identity to SEQ ID NO: 22 and a tracrRNA having at least 100% sequence identity to SEQ ID NO: 43, wherein said RGN polypeptide comprises an amino acid sequence having at least 100% sequence identity to SEQ ID NO: 2;
[1046] c) a gRNA comprising a CRISPR repeat having at least 100% sequence identity to SEQ ID NO: 23 and a tracrRNA having at least 100% sequence identity to SEQ ID NO: 44 or nucleotides 19-111 of SEQ ID NO: 1040, wherein said RGN polypeptide comprises an amino acid sequence having at least 100% sequence identity to SEQ ID NO: 3;
[1047] d) a gRNA comprising a CRISPR repeat having at least 100% sequence identity to SEQ ID NO: 24 and a tracrRNA having at least 100% sequence identity to SEQ ID NO: 45, wherein said RGN polypeptide comprises an amino acid sequence having at least 100% sequence identity to SEQ ID NO: 4;
[1048] e) a gRNA comprising a CRISPR repeat having at least 100% sequence identity to SEQ ID NO: 25 or nucleotides 1-17 of SEQ ID NO: 1041 or 1042, and a tracrRNA having at least 100% sequence identity to SEQ ID NO: 46 or nucleotides 22-85 of SEQ ID NO: 1041 or 1042, wherein said RGN polypeptide comprises an amino acid sequence having at least 100% sequence identity to SEQ ID NO: 5;
[1049] f) a gRNA comprising a CRISPR repeat having at least 100% sequence identity to SEQ ID NO: 26 and a tracrRNA having at least 100% sequence identity to SEQ ID NO: 47 or nucleotides 24-138 of SEQ ID NO: 1043, wherein said RGN polypeptide comprises an amino acid sequence having at least 100% sequence identity to SEQ ID NO: 6;
[1050] g) a gRNA comprising a CRISPR repeat having at least 100% sequence identity to SEQ ID NO: 27 or nucleotides 1-22 of SEQ ID NO: 1044 or 1045, and a tracrRNA having at least 100% sequence identity to SEQ ID NO: 48 or nucleotides 27-96 of SEQ ID NO 1044 or nucleotides 27-95 of SEQ ID NO: 1045, wherein said RGN polypeptide comprises an amino acid sequence having at least 100% sequence identity to SEQ ID NO: 7;
[1051] h) a gRNA comprising a CRISPR repeat having at least 100% sequence identity to SEQ ID NO: 28 and a tracrRNA having at least 100% sequence identity to SEQ ID NO: 49, wherein said RGN polypeptide comprises an amino acid sequence having at least 100% sequence identity to SEQ ID NO: 8;
[1052] i) a gRNA comprising a CRISPR repeat having at least 100% sequence identity to SEQ ID NO: 29 and a tracrRNA having at least 100% sequence identity to SEQ ID NO: 50, wherein said RGN polypeptide comprises an amino acid sequence having at least 100% sequence identity to SEQ ID NO: 9;
[1053] j) a gRNA comprising a CRISPR repeat having at least 100% sequence identity to SEQ ID NO: 30 and a tracrRNA having at least 100% sequence identity to SEQ ID NO: 51, wherein said RGN polypeptide comprises an amino acid sequence having at least 100% sequence identity to SEQ ID NOs:10;
[1054] k) a gRNA comprising a CRISPR repeat having at least 100% sequence identity to SEQ ID NO: 31 and a tracrRNA having at least 100% sequence identity to SEQ ID NO: 52, wherein said RGN polypeptide comprises an amino acid sequence having at least 100% sequence identity to SEQ ID NO: 11;
[1055] l) a gRNA comprising a CRISPR repeat having at least 100% sequence identity to SEQ ID NO: 32 and a tracrRNA having at least 100% sequence identity to SEQ ID NO: 53, wherein said RGN polypeptide comprises an amino acid sequence having at least 100% sequence identity to SEQ ID NO: 12;
[1056] m) a gRNA comprising a CRISPR repeat having at least 100% sequence identity to SEQ ID NO: 33 and a tracrRNA having at least 100% sequence identity to SEQ ID NO: 54, wherein said RGN polypeptide comprises an amino acid sequence having at least 100% sequence identity to SEQ ID NO: 13;
[1057] n) a gRNA comprising a CRISPR repeat having at least 100% sequence identity to SEQ ID NO: 34 and a tracrRNA having at least 100% sequence identity to SEQ ID NO: 55, wherein said RGN polypeptide comprises an amino acid sequence having at least 100% sequence identity to SEQ ID NO: 14;
[1058] o) a gRNA comprising a CRISPR repeat having at least 100% sequence identity to SEQ ID NO: 35 and a tracrRNA having at least 100% sequence identity to SEQ ID NO: 56, wherein said RGN polypeptide comprises an amino acid sequence having at least 100% sequence identity to SEQ ID NO: 15;
[1059] p) a gRNA comprising a CRISPR repeat having at least 100% sequence identity to SEQ ID NO: 36 and a tracrRNA having at least 100% sequence identity to SEQ ID NO: 57, wherein said RGN polypeptide comprises an amino acid sequence having at least 100% sequence identity to SEQ ID NO: 16;
[1060] q) a gRNA comprising a CRISPR repeat having at least 100% sequence identity to SEQ ID NO: 37 and a tracrRNA having at least 100% sequence identity to SEQ ID NO: 58, wherein said RGN polypeptide comprises an amino acid sequence having at least 100% sequence identity to SEQ ID NO: 17;
[1061] r) a gRNA comprising a CRISPR repeat having at least 100% sequence identity to SEQ ID NO: 38 or 39 and a tracrRNA having at least 100% sequence identity to SEQ ID NO: 59 or 60, wherein said RGN polypeptide comprises an amino acid sequence having at least 100% sequence identity to SEQ ID NO: 18;
[1062] s) a gRNA comprising a CRISPR repeat having at least 100% sequence identity to SEQ ID NO: 40 and a tracrRNA having at least 100% sequence identity to SEQ ID NO: 61, wherein said RGN polypeptide comprises an amino acid sequence having at least 100% sequence identity to SEQ ID NO: 19; and
[1063] t) a gRNA comprising a CRISPR repeat having at least 100% sequence identity to SEQ ID NO: 41 and a tracrRNA having at least 100% sequence identity to SEQ ID NO: 62, wherein said RGN polypeptide comprises an amino acid sequence having at least 100% sequence identity to SEQ ID NO: 20.

[1064] 121. The system of any one of embodiments 108-120, wherein said target sequence is located adjacent to a protospacer adjacent motif (PAM).

[1065] 122. The system of any one of embodiments 108-120, wherein the target sequence is within a cell.

[1066] 123. The system of any one of embodiments 108-122, wherein the one or more guide RNAs is capable of hybridizing to the non-target strand of said target sequence and the guide RNA is capable of forming a complex with the RGN polypeptide to direct cleavage of the target nucleic acid molecule.

[1067] 124. The system of embodiment 123, wherein the cleavage generates a double-stranded break.

[1068] 125. The system of embodiment 123, wherein the cleavage generates a single-stranded break.

[1069] 126. The system of any one of embodiments 108-122, wherein said RGN polypeptide is nuclease inactive or is a nickase.

[1070] 127. The system of any one of embodiments 108-126, wherein the RGN polypeptide is operably linked to a base-editing polypeptide.

[1071] 128. The system of embodiment 127, wherein the base-editing polypeptide is a deaminase.

[1072] 129. The system of embodiment 128, wherein the deaminase is a cytosine deaminase or an adenine deaminase.

[1073] 130. The system of embodiment 128, wherein the deaminase has at least 90% sequence identity to an amino acid sequence of any one of SEQ ID NOs: 481-552.

[1074] 131. The system of embodiment 128, wherein the deaminase has 100% sequence identity to an amino acid sequence of any one of SEQ ID NOs: 481-552.

[1075] 132. The system of any one of embodiments 108-131, wherein the RGN polypeptide comprises one or more nuclear localization signals.

[1076] 133. The system of any one of embodiments 108-132, wherein the RGN polypeptide is codon optimized for expression in a eukaryotic cell.

[1077] 134. The system of any one of embodiments 108-133, wherein the nucleotide sequences encoding the one or more guide RNAs and the nucleotide sequence encoding the RGN polypeptide are located on one vector.

[1078] 135. The system of any one of embodiments 108-134, wherein said system further comprises one or more donor polynucleotides.

[1079] 136. A cell comprising the system of any one of embodiments 108-135.

[1080] 137. The cell of embodiment 136, wherein the cell is a prokaryotic cell.

[1081] 138. The cell of embodiment 136, wherein the cell is a eukaryotic cell.

[1082] 139. The cell of embodiment 138, wherein the eukaryotic cell is a mammalian cell.

[1083] 140. The cell of embodiment 139, wherein the mammalian cell is a human cell.

[1084] 141. The cell of embodiment 140, wherein the human cell is an immune cell.

[1085] 142. The cell of embodiment 141, wherein the immune cell is a stem cell.

[1086] 143. The cell of embodiment 142, wherein the stem cell is an induced pluripotent stem cell.

[1087] 144. The cell of embodiment 138, wherein the eukaryotic cell is an insect or avian cell.

[1088] 145. The cell of embodiment 138, wherein the eukaryotic cell is a fungal cell.

[1089] 146. The cell of embodiment 138, wherein the eukaryotic cell is a plant cell.

[1090] 147. A plant comprising the cell of embodiment 146.

[1091] 148. A seed comprising the cell of embodiment 146.

[1092] 149. A pharmaceutical composition comprising the nucleic acid molecule of any one of embodiments 1-17, 63-67, and 79-83, the vector of any one of embodiments 18-24, 68-78, and 84-94, the cell of any one of embodiments 27-32, 97-102, and 138-143, the RGN polypeptide of any one of embodiments 46-61, the RNP complex of embodiment 62, or the system of any one of embodiments 108-135, and a pharmaceutically acceptable carrier.

[1093] 150. The pharmaceutical composition of embodiment 149, wherein the pharmaceutically acceptable carrier is heterologous to said nucleic acid molecule, said vector, said cell, said RGN polypeptide, or said system.

[1094] 151. The pharmaceutical composition of embodiment 149 or 150, wherein the pharmaceutically acceptable carrier is not naturally-occurring.

[1095] 152. The pharmaceutical composition of any one of embodiments 149-151, wherein the pharmaceutical composition is lipid-based.

[1096] 153. The pharmaceutical composition of embodiment 152, wherein the lipid-based pharmaceutical composition comprises liposomes or lipid nanoparticles (LNPs).

[1097] 154. The pharmaceutical composition of embodiment 153, wherein the nucleic acid molecule, the vector, the cell, the RGN polypeptide, the RNP complex, or the system is encapsulated in, and/or non-covalently or covalently attached to the liposomes or the LNPs.

[1098] 155. A method for binding a target sequence in a target nucleic acid molecule comprising delivering a system according to any one of embodiments 108-135, to said target sequence or a cell comprising the target sequence.

[1099] 156. The method of embodiment 155, wherein said RGN polypeptide or said guide RNA further comprises a detectable label, thereby allowing for detection of said target sequence.

[1100] 157. The method of embodiment 155, wherein said guide RNA or said RGN polypeptide further comprises an expression modulator, thereby modulating expression of a target gene comprising said target sequence.

[1101] 158. A method for cleaving and/or modifying a target nucleic acid molecule comprising a target sequence, said method comprising delivering a system according to any one of embodiments 108-135 to said target sequence or a cell comprising the target sequence, wherein cleavage or modification of said target nucleic acid molecule occurs.

[1102] 159. The method of embodiment 158, wherein said modified target nucleic acid molecule comprises insertion of heterologous DNA into the target nucleic acid molecule.

[1103] 160. The method of embodiment 158, wherein said modified target nucleic acid molecule comprises deletion of at least one nucleotide from the target nucleic acid molecule.

[1104] 161. The method of embodiment 158, wherein said modified target nucleic acid molecule comprises mutation of at least one nucleotide in the target nucleic acid molecule.

[1105] 162. A method for binding a target sequence in a target nucleic acid molecule, wherein the target sequence comprises a target strand and a non-target strand, said method comprising:
[1106] a) assembling an RNA-guided nuclease (RGN) ribonucleotide complex by combining:
[1107] i) one or more guide RNAs capable of hybridizing to the non-target strand of the target sequence; and
[1108] ii) an RGN polypeptide comprising an amino acid sequence having at least 90% sequence identity to any one of SEQ ID NOs:1-20;
   [1109] under conditions suitable for formation of the RGN ribonucleotide complex; and
[1110] b) contacting said target nucleic acid molecule or a cell comprising said target nucleic acid molecule with the assembled RGN ribonucleotide complex;
[1111] wherein the one or more guide RNAs hybridize to the non-target strand of the target sequence, thereby directing said RGN polypeptide to bind to said target sequence.

[1112] 163. The method of embodiment 162, wherein said method is performed in vitro, in vivo, or ex vivo.

[1113] 164. The method of embodiment 162 or 163, wherein said RGN polypeptide or said guide RNA further comprises a detectable label, thereby allowing for detection of said target sequence.

[1114] 165. The method of embodiment 162 or 163, wherein said guide RNA or said RGN polypeptide further comprises an expression modulator, thereby allowing for the modulation of expression of a target gene comprising said target sequence.

[1115] 166. The method of embodiment 162 or 163, wherein said RGN polypeptide further comprises a base-editing polypeptide, thereby allowing for the modification of said target nucleic acid molecule.

[1116] 167. The method of embodiment 166, wherein said base-editing polypeptide comprises a deaminase.

[1117] 168. The method of embodiment 167, wherein said deaminase is a cytosine deaminase or an adenine deaminase.

[1118] 169. The method of embodiment 167, wherein the deaminase has at least 90% sequence identity to an amino acid sequence of any one of SEQ ID NOs: 481-552.

[1119] 170. The method of embodiment 167, wherein the deaminase has 100% sequence identity to an amino acid sequence of any one of SEQ ID NOs: 481-552.

[1120] 171. The method of embodiment 162 or 163, wherein said RGN polypeptide is capable of cleaving said target nucleic acid molecule, thereby allowing for the cleaving and/or modifying of said target nucleic acid molecule.

[1121] 172. A method for cleaving and/or modifying a target nucleic acid molecule comprising a target sequence, wherein said target sequence comprises a target strand and a non-target strand, said method comprising contacting the target nucleic acid molecule with:
[1122] a) an RNA-guided nuclease (RGN) polypeptide, wherein said RGN comprises an amino acid sequence having at least 90% sequence identity to any one of SEQ ID NOs: 1-20; and
[1123] b) one or more guide RNAs capable of targeting the RGN of (a) to the target sequence; wherein the one or more guide RNAs hybridize to the non-target strand of the target sequence, thereby directing said RGN polypeptide to bind to said target nucleic acid molecule and cleavage and/or modification of said target nucleic acid molecule occurs.

[1124] 173. The method of embodiment 172, wherein cleavage by said RGN polypeptide generates a double-stranded break.

[1125] 174. The method of embodiment 172, wherein cleavage by said RGN polypeptide generates a single-stranded break.

[1126] 175. The method of embodiment 172, wherein said RGN polypeptide is nuclease inactive or a nickase and is operably fused to a base-editing polypeptide.

[1127] 176. The method of embodiment 175, wherein the base-editing polypeptide is a deaminase.

[1128] 177. The method of embodiment 175, wherein the deaminase is a cytosine deaminase or an adenine deaminase.

[1129] 178. The method of embodiment 176, wherein the deaminase has at least 90% sequence identity to an amino acid sequence of any one of SEQ ID NOs: 481-552.

[1130] 179. The method of embodiment 176, wherein the deaminase has 100% sequence identity to an amino acid sequence of any one of SEQ ID NOs: 481-552.

[1131] 180. The method of embodiment 172, wherein said modified target nucleic acid molecule comprises insertion of heterologous DNA into the target nucleic acid molecule.

[1132] 181. The method of embodiment 172, wherein said modified target nucleic acid molecule comprises deletion of at least one nucleotide from the target nucleic acid molecule.

[1133] 182. The method of embodiment 172, wherein said modified target nucleic acid molecule comprises mutation of at least one nucleotide in the target nucleic acid molecule.

[1134] 183. The method of any one of embodiments 162-182, wherein said target sequence is located adjacent to a protospacer adjacent motif (PAM).

[1135] 184. The method of any one of embodiments 162-183, wherein said target sequence is a eukaryotic target sequence.

[1136] 185. The method of any one of embodiments 162-184, wherein said gRNA is a single guide RNA (sgRNA).

[1137] 186. The method of any one of embodiments 162-184, wherein said gRNA is a dual-guide RNA.

[1138] 187. The method of any one of embodiments 162-186, wherein said RGN comprises an amino acid sequence having at least 95% sequence identity to any one of SEQ ID NOs: 1-20.

[1139] 188. The method of any one of embodiments 162-186, wherein said RGN comprises an amino acid sequence having 100% sequence identity to any one of SEQ ID NOs: 1-20.

[1140] 189. The method of any one of embodiments 162-186, wherein:
[1141] a) said RGN has at least 90% sequence identity to SEQ ID NO: 1, said guide RNA comprises a crRNA repeat having at least 90% sequence identity to SEQ ID NO: 21 and a tracrRNA having at least 90% sequence identity to SEQ ID NO: 42;
[1142] b) said RGN has at least 90% sequence identity to SEQ ID NO: 2, said guide RNA comprises a crRNA repeat having at least 90% sequence identity to SEQ ID NO: 22 and a tracrRNA having at least 90% sequence identity to SEQ ID NO: 43;
[1143] c) said RGN has at least 90% sequence identity to SEQ ID NO: 3, said guide RNA comprises a crRNA repeat having at least 90% sequence identity to SEQ ID NO: 23 and a tracrRNA having at least 90% sequence identity to SEQ ID NO: 44 or nucleotides 19-111 of SEQ ID NO: 1040;
[1144] d) said RGN has at least 90% sequence identity to SEQ ID NO: 4, said guide RNA comprises a crRNA repeat having at least 90% sequence identity to SEQ ID NO: 24 and a tracrRNA having at least 90% sequence identity to SEQ ID NO: 45;
[1145] e) said RGN has at least 90% sequence identity to SEQ ID NO: 5, said guide RNA comprises a crRNA repeat having at least 90% sequence identity to SEQ ID NO: 25 or nucleotides 1-17 of SEQ ID NO: 1041 or 1042, and a tracrRNA having at least 90% sequence identity to SEQ ID NO: 46 or nucleotides 22-85 of SEQ ID NO: 1041 or 1042;
[1146] f) said RGN has at least 90% sequence identity to SEQ ID NO: 6, said guide RNA comprises a crRNA repeat having at least 90% sequence identity to SEQ ID NO: 26 and a tracrRNA having at least 90% sequence identity to SEQ ID NO: 47 or nucleotides 24-138 of SEQ ID NO: 1043;
[1147] g) said RGN has at least 90% sequence identity to SEQ ID NO: 7, said guide RNA comprises a crRNA repeat having at least 90% sequence identity to SEQ ID NO: 27 or nucleotides 1-22 of SEQ ID NO: 1044 or 1045, and a tracrRNA having at least 90% sequence identity to SEQ ID NO: 48 or nucleotides 27-96 of SEQ ID NO 1044 or nucleotides 27-95 of SEQ ID NO: 1045;
[1148] h) said RGN has at least 90% sequence identity to SEQ ID NO: 8, said guide RNA comprises a crRNA repeat having at least 90% sequence identity to SEQ ID NO: 28 and a tracrRNA having at least 90% sequence identity to SEQ ID NO: 49;

[1149] i) said RGN has at least 90% sequence identity to SEQ ID NO: 9, said guide RNA comprises a crRNA repeat having at least 90% sequence identity to SEQ ID NO: 29 and a tracrRNA having at least 90% sequence identity to SEQ ID NO: 50;

[1150] j) said RGN has at least 90% sequence identity to SEQ ID NO: 10, said guide RNA comprises a crRNA repeat having at least 90% sequence identity to SEQ ID NO: 30 and a tracrRNA having at least 90% sequence identity to SEQ ID NO: 51;
[1151] k) said RGN has at least 90% sequence identity to SEQ ID NO: 11, said guide RNA comprises a crRNA repeat having at least 90% sequence identity to SEQ ID NO: 31 and a tracrRNA having at least 90% sequence identity to SEQ ID NO: 52;
[1152] l) said RGN has at least 90% sequence identity to SEQ ID NO: 12, said guide RNA comprises a crRNA repeat having at least 90% sequence identity to SEQ ID NO: 32 and a tracrRNA having at least 90% sequence identity to SEQ ID NO: 53;
[1153] m) said RGN has at least 90% sequence identity to SEQ ID NO: 13, said guide RNA comprises a crRNA repeat having at least 90% sequence identity to SEQ ID NO: 33 and a tracrRNA having at least 90% sequence identity to SEQ ID NO: 54;
[1154] n) said RGN has at least 90% sequence identity to SEQ ID NO: 14, said guide RNA comprises a crRNA repeat having at least 90% sequence identity to SEQ ID NO: 34 and a tracrRNA having at least 90% sequence identity to SEQ ID NO: 55;
[1155] o) said RGN has at least 90% sequence identity to SEQ ID NO: 15, said guide RNA comprises a crRNA repeat having at least 90% sequence identity to SEQ ID NO: 35 and a tracrRNA having at least 90% sequence identity to SEQ ID NO: 56;
[1156] p) said RGN has at least 90% sequence identity to SEQ ID NO: 16, said guide RNA comprises a crRNA repeat having at least 90% sequence identity to SEQ ID NO: 36 and a tracrRNA having at least 90% sequence identity to SEQ ID NO: 57;
[1157] q) said RGN has at least 90% sequence identity to SEQ ID NO: 17, said guide RNA comprises a crRNA repeat having at least 90% sequence identity to SEQ ID NO: 37 and a tracrRNA having at least 90% sequence identity to SEQ ID NO: 58;
[1158] r) said RGN has at least 90% sequence identity to SEQ ID NO: 18, said guide RNA comprises a crRNA repeat having at least 90% sequence identity to SEQ ID NO: 38, or 39 and a tracrRNA having at least 90% sequence identity to SEQ ID NO: 59 or 60;
[1159] s) said RGN has at least 90% sequence identity to SEQ ID NO: 19, said guide RNA comprises a crRNA repeat having at least 90% sequence identity to SEQ ID NO: 40 and a tracrRNA having at least 90% sequence identity to SEQ ID NO: 61; and
[1160] t) said RGN has at least 90% sequence identity to SEQ ID NO: 20, said guide RNA comprises a crRNA repeat having at least 90% sequence identity to SEQ ID NO: 41 and a tracrRNA having at least 90% sequence identity to SEQ ID NO: 62.

[1161] 190. The method of any one of embodiments 162-186, wherein:
[1162] a) said RGN has at least 95% sequence identity to SEQ ID NO: 1, said guide RNA comprises a crRNA repeat having at least 95% sequence identity to SEQ ID NO: 21 and a tracrRNA having at least 95% sequence identity to SEQ ID NO: 42;
[1163] b) said RGN has at least 95% sequence identity to SEQ ID NO: 2, said guide RNA comprises a crRNA repeat having at least 95% sequence identity to SEQ ID NO: 22 and a tracrRNA having at least 95% sequence identity to SEQ ID NO: 43;
[1164] c) said RGN has at least 95% sequence identity to SEQ ID NO: 3, said guide RNA comprises a crRNA repeat having at least 95% sequence identity to SEQ ID NO: 23 and a tracrRNA having at least 95% sequence identity to SEQ ID NO: 44 or nucleotides 19-111 of SEQ ID NO: 1040;
[1165] d) said RGN has at least 95% sequence identity to SEQ ID NO: 4, said guide RNA comprises a crRNA repeat having at least 95% sequence identity to SEQ ID NO: 24 and a tracrRNA having at least 95% sequence identity to SEQ ID NO: 45;
[1166] e) said RGN has at least 95% sequence identity to SEQ ID NO: 5, said guide RNA comprises a crRNA repeat having at least 95% sequence identity to SEQ ID NO: 25 or nucleotides 1-17 of SEQ ID NO: 1041 or 1042, and a tracrRNA having at least 95% sequence identity to SEQ ID NO: 46 or nucleotides 22-85 of SEQ ID NO: 1041 or 1042;
[1167] f) said RGN has at least 95% sequence identity to SEQ ID NO: 6, said guide RNA comprises a crRNA repeat having at least 95% sequence identity to SEQ ID NO: 26 and a tracrRNA having at least 95% sequence identity to SEQ ID NO: 47 or nucleotides 24-138 of SEQ ID NO: 1043;
[1168] g) said RGN has at least 95% sequence identity to SEQ ID NO: 7, said guide RNA comprises a crRNA repeat having at least 95% sequence identity to SEQ ID NO: 27 or nucleotides 1-22 of SEQ ID NO: 1044 or 1045, and a tracrRNA having at least 95% sequence identity to SEQ ID NO: 48 or nucleotides 27-96 of SEQ ID NO 1044 or nucleotides 27-95 of SEQ ID NO: 1045;
[1169] h) said RGN has at least 95% sequence identity to SEQ ID NO: 8, said guide RNA comprises a crRNA repeat having at least 95% sequence identity to SEQ ID NO: 28 and a tracrRNA having at least 95% sequence identity to SEQ ID NO: 49;

[1170] i) said RGN has at least 95% sequence identity to SEQ ID NO: 9, said guide RNA comprises a crRNA repeat having at least 95% sequence identity to SEQ ID NO: 29 and a tracrRNA having at least 95% sequence identity to SEQ ID NO: 50;
[1171] j) said RGN has at least 95% sequence identity to SEQ ID NO: 10, said guide RNA comprises a crRNA repeat having at least 95% sequence identity to SEQ ID NO: 30 and a tracrRNA having at least 95% sequence identity to SEQ ID NO: 51;
[1172] k) said RGN has at least 95% sequence identity to SEQ ID NO: 11, said guide RNA comprises a crRNA repeat having at least 95% sequence identity to SEQ ID NO: 31 and a tracrRNA having at least 95% sequence identity to SEQ ID NO: 52;
[1173] l) said RGN has at least 95% sequence identity to SEQ ID NO: 12, said guide RNA comprises a crRNA repeat having at least 95% sequence identity to SEQ ID NO: 32 and a tracrRNA having at least 95% sequence identity to SEQ ID NO: 53;
[1174] m) said RGN has at least 95% sequence identity to SEQ ID NO: 13, said guide RNA comprises a crRNA repeat having at least 95% sequence identity to SEQ ID NO: 33 and a tracrRNA having at least 95% sequence identity to SEQ ID NO: 54;
[1175] n) said RGN has at least 95% sequence identity to SEQ ID NO: 14, said guide RNA comprises a crRNA repeat having at least 95% sequence identity to SEQ ID NO: 34 and a tracrRNA having at least 95% sequence identity to SEQ ID NO: 55;
[1176] o) said RGN has at least 95% sequence identity to SEQ ID NO: 15, said guide RNA comprises a crRNA repeat having at least 95% sequence identity to SEQ ID NO: 35 and a tracrRNA having at least 95% sequence identity to SEQ ID NO: 56;
[1177] p) said RGN has at least 95% sequence identity to SEQ ID NO: 16, said guide RNA comprises a crRNA repeat having at least 95% sequence identity to SEQ ID NO: 36 and a tracrRNA having at least 95% sequence identity to SEQ ID NO: 57;
[1178] q) said RGN has at least 95% sequence identity to SEQ ID NO: 17, said guide RNA comprises a crRNA repeat having at least 95% sequence identity to SEQ ID NO: 37 and a tracrRNA having at least 95% sequence identity to SEQ ID NO: 58;
[1179] r) said RGN has at least 95% sequence identity to SEQ ID NO: 18, said guide RNA comprises a crRNA repeat having at least 95% sequence identity to SEQ ID NO: 38, or 39 and a tracrRNA having at least 95% sequence identity to SEQ ID NO: 59 or 60;
[1180] s) said RGN has at least 95% sequence identity to SEQ ID NO: 19, said guide RNA comprises a crRNA repeat having at least 95% sequence identity to SEQ ID NO: 40 and a tracrRNA having at least 95% sequence identity to SEQ ID NO: 61; and
[1181] t) said RGN has at least 95% sequence identity to SEQ ID NO: 20, said guide RNA comprises a crRNA repeat having at least 95% sequence identity to SEQ ID NO: 41 and a tracrRNA having at least 95% sequence identity to SEQ ID NO: 62.

[1182] 191. The method of any one of embodiments 162-186, wherein:
[1183] a) said RGN has at least 100% sequence identity to SEQ ID NO: 1, said guide RNA comprises a crRNA repeat having at least 100% sequence identity to SEQ ID NO: 21 and a tracrRNA having at least 100% sequence identity to SEQ ID NO: 42;
[1184] b) said RGN has at least 100% sequence identity to SEQ ID NO: 2, said guide RNA comprises a crRNA repeat having at least 100% sequence identity to SEQ ID NO: 22 and a tracrRNA having at least 100% sequence identity to SEQ ID NO: 43;
[1185] c) said RGN has at least 100% sequence identity to SEQ ID NO: 3, said guide RNA comprises a crRNA repeat having at least 100% sequence identity to SEQ ID NO: 23 and a tracrRNA having at least 100% sequence identity to SEQ ID NO: 44 or nucleotides 19-111 of SEQ ID NO: 1040;
[1186] d) said RGN has at least 100% sequence identity to SEQ ID NO: 4, said guide RNA comprises a crRNA repeat having at least 100% sequence identity to SEQ ID NO: 24 and a tracrRNA having at least 100% sequence identity to SEQ ID NO: 45;
[1187] e) said RGN has at least 100% sequence identity to SEQ ID NO: 5, said guide RNA comprises a crRNA repeat having at least 100% sequence identity to SEQ ID NO: 25 or nucleotides 1-17 of SEQ ID NO: 1041 or 1042, and a tracrRNA having at least 100% sequence identity to SEQ ID NO: 46 or nucleotides 22-85 of SEQ ID NO: 1041 or 1042;
[1188] f) said RGN has at least 100% sequence identity to SEQ ID NO: 6, said guide RNA comprises a crRNA repeat having at least 100% sequence identity to SEQ ID NO: 26 and a tracrRNA having at least 100% sequence identity to SEQ ID NO: 47 or nucleotides 24-138 of SEQ ID NO: 1043;
[1189] g) said RGN has at least 100% sequence identity to SEQ ID NO: 7, said guide RNA comprises a crRNA repeat having at least 100% sequence identity to SEQ ID NO: 27 or nucleotides 1-22 of SEQ ID NO: 1044 or 1045, and a tracrRNA having at least 100% sequence identity to SEQ ID NO: 48 or nucleotides 27-96 of SEQ ID NO 1044 or nucleotides 27-95 of SEQ ID NO: 1045;
[1190] h) said RGN has at least 100% sequence identity to SEQ ID NO: 8, said guide RNA comprises a crRNA repeat having at least 100% sequence identity to SEQ ID NO: 28 and a tracrRNA having at least 100% sequence identity to SEQ ID NO: 49;
[1191] i) said RGN has at least 100% sequence identity to SEQ ID NO: 9, said guide RNA comprises a crRNA repeat having at least 100% sequence identity to SEQ ID NO: 29 and a tracrRNA having at least 100% sequence identity to SEQ ID NO: 50;
[1192] j) said RGN has at least 100% sequence identity to SEQ ID NO: 10, said guide RNA comprises a crRNA repeat having at least 100% sequence identity to SEQ ID NO: 30 and a tracrRNA having at least 100% sequence identity to SEQ ID NO: 51;
[1193] k) said RGN has at least 100% sequence identity to SEQ ID NO: 11, said guide RNA comprises a crRNA repeat having at least 100% sequence identity to SEQ ID NO: 31 and a tracrRNA having at least 100% sequence identity to SEQ ID NO: 52;
[1194] l) said RGN has at least 100% sequence identity to SEQ ID NO: 12, said guide RNA comprises a crRNA repeat having at least 100% sequence identity to SEQ ID NO: 32 and a tracrRNA having at least 100% sequence identity to SEQ ID NO: 53;
[1195] m) said RGN has at least 100% sequence identity to SEQ ID NO: 13, said guide RNA comprises a crRNA repeat having at least 100% sequence identity to SEQ ID NO: 33 and a tracrRNA having at least 100% sequence identity to SEQ ID NO: 54;
[1196] n) said RGN has at least 100% sequence identity to SEQ ID NO: 14, said guide RNA comprises a crRNA repeat having at least 100% sequence identity to SEQ ID NO: 34 and a tracrRNA having at least 100% sequence identity to SEQ ID NO: 55;
[1197] o) said RGN has at least 100% sequence identity to SEQ ID NO: 15, said guide RNA comprises a crRNA repeat having at least 100% sequence identity to SEQ ID NO: 35 and a tracrRNA having at least 100% sequence identity to SEQ ID NO: 56;
[1198] p) said RGN has at least 100% sequence identity to SEQ ID NO: 16, said guide RNA comprises a crRNA repeat having at least 100% sequence identity to SEQ ID NO: 36 and a tracrRNA having at least 100% sequence identity to SEQ ID NO: 57;
[1199] q) said RGN has at least 100% sequence identity to SEQ ID NO: 17, said guide RNA comprises a crRNA repeat having at least 100% sequence identity to SEQ ID NO: 37 and a tracrRNA having at least 100% sequence identity to SEQ ID NO: 58;
[1200] r) said RGN has at least 100% sequence identity to SEQ ID NO: 18, said guide RNA comprises a crRNA repeat having at least 100% sequence identity to SEQ ID NO: 38, or 39 and a tracrRNA having at least 100% sequence identity to SEQ ID NO: 59 or 60;
[1201] s) said RGN has at least 100% sequence identity to SEQ ID NO: 19, said guide RNA comprises a crRNA repeat having at least 100% sequence identity to SEQ ID NO: 40 and a tracrRNA having at least 100% sequence identity to SEQ ID NO: 61; and
[1202] t) said RGN has at least 100% sequence identity to SEQ ID NO: 20, said guide RNA comprises a crRNA repeat having at least 100% sequence identity to SEQ ID NO: 41 and a tracrRNA having at least 100% sequence identity to SEQ ID NO: 62.

[1203] 192. The method of any one of embodiments 155-191, wherein the target sequence is within a cell.

[1204] 193. The method of embodiment 192, wherein the cell is a eukaryotic cell.

[1205] 194. The method of embodiment 193, wherein the eukaryotic cell is a mammalian cell.

[1206] 195. The method of embodiment 194, wherein said mammalian cell is a human cell.

[1207] 196. The method of embodiment 195, wherein said human cell is an immune cell.

[1208] 197. The method of embodiment 196, wherein said immune cell is a stem cell.

[1209] 198. The method of embodiment 197, wherein said stem cell is an induced pluripotent stem cell.

[1210] 199. The method of embodiment 193, wherein the eukaryotic cell is an insect or avian cell.

[1211] 200. The method of embodiment 192, wherein the cell is a prokaryotic cell.

[1212] 201. The method of embodiment 193, wherein the eukaryotic cell is a fungal cell.

[1213] 202. The method of embodiment 193, wherein the eukaryotic cell is a plant cell.

[1214] 203. The method of any one of embodiments 192-202, further comprising culturing the cell under conditions in which the RGN polypeptide is expressed and cleaves and modifies the target nucleic acid molecule to produce a modified target nucleic acid molecule; and selecting a cell comprising said modified target nucleic acid molecule.

[1215] 204. A cell comprising a modified target nucleic acid molecule according to the method of embodiment 203.

[1216] 205. The cell of embodiment 204, wherein the cell is a eukaryotic cell.

[1217] 206. The cell of embodiment 205, wherein the eukaryotic cell is a mammalian cell.

[1218] 207. The cell of embodiment 206, wherein said mammalian cell is a human cell.

[1219] 208. The cell of embodiment 207, wherein said human cell is an immune cell.

[1220] 209. The cell of embodiment 208, wherein said immune cell is a stem cell.

[1221] 210. The cell of embodiment 209, wherein said stem cell is an induced pluripotent stem cell.

[1222] 211. The cell of embodiment 205, wherein the eukaryotic cell is an insect or avian cell.

[1223] 212. The cell of embodiment 204, wherein the cell is a prokaryotic cell.

[1224] 213. The cell of embodiment 205, wherein the eukaryotic cell is a fungal cell.

[1225] 214. The cell of embodiment 205, wherein the eukaryotic cell is a plant cell.

[1226] 215. A plant comprising the cell of embodiment 214.

[1227] 216. A seed comprising the cell of embodiment 214.

[1228] 217. A pharmaceutical composition comprising the cell of any one of embodiments 205-210 and a pharmaceutically acceptable carrier.

[1229] 218. A method for producing a genetically modified cell with a correction in a causal mutation for a genetically inherited disease, the method comprising introducing into the cell:
[1230] a) an RNA-guided nuclease (RGN) polypeptide, wherein the RGN polypeptide comprises an amino acid sequence having at least 90% sequence identity to any one of SEQ ID NOs: 1-20, or a polynucleotide encoding said RGN polypeptide, wherein said polynucleotide encoding the RGN polypeptide is operably linked to a promoter to enable expression of the RGN polypeptide in the cell; and
[1231] b) a guide RNA (gRNA) or a polynucleotide encoding said gRNA, wherein said polynucleotide encoding the gRNA is operably linked to a promoter to enable expression of the gRNA in the cell
[1232] whereby the RGN and gRNA target to the genomic location of the causal mutation and modify the genomic sequence to remove the causal mutation.

[1233] 219. The method of embodiment 218, wherein the RGN is nuclease inactive or a nickase and is fused to a polypeptide which has base-editing activity.

[1234] 220. The method of embodiment 219, wherein the base-editing polypeptide is a deaminase.

[1235] 221. The method of embodiment 220, wherein the polypeptide with base-editing activity is a cytosine deaminase or an adenine deaminase.

[1236] 222. The method of embodiment 218, wherein the deaminase has at least 90% sequence identity to an amino acid sequence of any one of SEQ ID NOs: 481-552.

[1237] 223. The method of embodiment 218, wherein the deaminase has 100% sequence identity to an amino acid sequence of any one of SEQ ID NOs: 481-552.

[1238] 224. The method of any one of embodiments 218-223, wherein the genetically inherited disease is caused by a single nucleotide polymorphism.

[1239] 225. The method of any one of embodiments 218-223, wherein the genetically inherited disease is Hurler Syndrome.

[1240] 226. The method of embodiment 224, wherein the gRNA further comprises a spacer that targets a region proximal to the causal single nucleotide polymorphism.

[1241] 227. A method for producing a genetically modified cell with a deletion in a disease-causing expanded trinucleotide repeat, the method comprising introducing into the cell:
[1242] a) an RNA-guided nuclease (RGN) polypeptide, wherein the RGN polypeptide comprises an amino acid sequence having at least 90% sequence identity to any one of SEQ ID NOs: 1-20, or a polynucleotide encoding said RGN polypeptide, wherein said polynucleotide encoding the RGN polypeptide is operably linked to a promoter to enable expression of the RGN polypeptide in the cell; and
[1243] b) a first guide RNA (gRNA) or a polynucleotide encoding said gRNA, wherein said polynucleotide encoding the gRNA is operably linked to a promoter to enable expression of the gRNA in the cell, and further wherein the gRNA comprises a spacer that targets the 5′ flank of the expanded trinucleotide repeat; and
[1244] c) a second guide RNA (gRNA) or a polynucleotide encoding said gRNA, wherein said polynucleotide encoding the gRNA is operably linked to a promoter to enable expression of the gRNA in the cell, and further wherein said second gRNA comprises a spacer that targets the 3′ flank of the expanded trinucleotide repeat;
[1245] whereby the RGN and the two gRNAs target to the expanded trinucleotide repeat and at least a portion of the expanded trinucleotide repeat is removed.

[1246] 228. The method of embodiment 227, wherein the genetically inherited disease is Friedrich's Ataxia or Huntington's Disease.

[1247] 229. The method of embodiment 227, wherein the first gRNA further comprises a spacer that targets a region within or proximal to the expanded trinucleotide repeat.

[1248] 230. The method of embodiment 229, wherein the second gRNA further comprises a spacer that targets a region within or proximal to the expanded trinucleotide repeat.

[1249] 231. The method of any one of embodiments 218-230, wherein said RGN polypeptide has at least 95% sequence identity to any one of SEQ ID NOs: 1-20.

[1250] 232. The method of any one of embodiments 218-230, wherein said RGN polypeptide has 100% sequence identity to any one of SEQ ID NOs: 1-20.

[1251] 233. The method of any one of embodiments 218-230, wherein said gRNA, said first gRNA, said second gRNA, or said first gRNA and said second gRNA is selected from a gRNA selected from the group consisting of:
[1252] a) a gRNA comprising a CRISPR repeat having at least 90% sequence identity to SEQ ID NO: 21 and a tracrRNA having at least 90% sequence identity to SEQ ID NO: 42, wherein said RGN polypeptide has an amino acid sequence having at least 90% sequence identity to SEQ ID NO: 1;
[1253] b) a gRNA comprising a CRISPR repeat having at least 90% sequence identity to SEQ ID NO: 22 and a tracrRNA having at least 90% sequence identity to SEQ ID NO: 43, wherein said RGN polypeptide has an amino acid sequence having at least 90% sequence identity to SEQ ID NO: 2;
[1254] c) a gRNA comprising a CRISPR repeat having at least 90% sequence identity to SEQ ID NO: 23 and a tracrRNA having at least 90% sequence identity to SEQ ID NO: 44 or nucleotides 19-111 of SEQ ID NO: 1040, wherein said RGN polypeptide has an amino acid sequence having at least 90% sequence identity to SEQ ID NO: 3;
[1255] d) a gRNA comprising a CRISPR repeat having at least 90% sequence identity to SEQ ID NO: 24 and a tracrRNA having at least 90% sequence identity to SEQ ID NO: 45, wherein said RGN polypeptide has an amino acid sequence having at least 90% sequence identity to SEQ ID NO: 4;
[1256] e) a gRNA comprising a CRISPR repeat having at least 90% sequence identity to SEQ ID NO: 25 or nucleotides 1-17 of SEQ ID NO: 1041 or 1042, and a tracrRNA having at least 90% sequence identity to SEQ ID NO: 46 or nucleotides 22-85 of SEQ ID NO: 1041 or 1042, wherein said RGN polypeptide has an amino acid sequence having at least 90% sequence identity to SEQ ID NO: 5;
[1257] f) a gRNA comprising a CRISPR repeat having at least 90% sequence identity to SEQ ID NO: 26 and a tracrRNA having at least 90% sequence identity to SEQ ID NO: 47 or nucleotides 24-138 of SEQ ID NO: 1043, wherein said RGN polypeptide has an amino acid sequence having at least 90% sequence identity to SEQ ID NO: 6;
[1258] g) a gRNA comprising a CRISPR repeat having at least 90% sequence identity to SEQ ID NO: 27 or nucleotides 1-22 of SEQ ID NO: 1044 or 1045, and a tracrRNA having at least 90% sequence identity to SEQ ID NO: 48 or nucleotides 27-96 of SEQ ID NO 1044 or nucleotides 27-95 of SEQ ID NO: 1045, wherein said RGN polypeptide has an amino acid sequence having at least 90% sequence identity to SEQ ID NO: 7;
[1259] h) a gRNA comprising a CRISPR repeat having at least 90% sequence identity to SEQ ID NO: 28 and a tracrRNA having at least 90% sequence identity to SEQ ID NO: 49, wherein said RGN polypeptide has an amino acid sequence having at least 90% sequence identity to SEQ ID NO: 8;
[1260] i) a gRNA comprising a CRISPR repeat having at least 90% sequence identity to SEQ ID NO: 29 and a tracrRNA having at least 90% sequence identity to SEQ ID NO: 50, wherein said RGN polypeptide has an amino acid sequence having at least 90% sequence identity to SEQ ID NO: 9;
[1261] j) a gRNA comprising a CRISPR repeat having at least 90% sequence identity to SEQ ID NO: 30 and a tracrRNA having at least 90% sequence identity to SEQ ID NO: 51, wherein said RGN polypeptide has an amino acid sequence having at least 90% sequence identity to SEQ ID NO: 10;
[1262] k) a gRNA comprising a CRISPR repeat having at least 90% sequence identity to SEQ ID NO: 31 and a tracrRNA having at least 90% sequence identity to SEQ ID NO: 52, wherein said RGN polypeptide has an amino acid sequence having at least 90% sequence identity to SEQ ID NO: 11;
[1263] l) a gRNA comprising a CRISPR repeat having at least 90% sequence identity to SEQ ID NO: 32 and a tracrRNA having at least 90% sequence identity to SEQ ID NO: 53, wherein said RGN polypeptide has an amino acid sequence having at least 90% sequence identity to SEQ ID NO: 12;
[1264] m) a gRNA comprising a CRISPR repeat having at least 90% sequence identity to SEQ ID NO: 33 and a tracrRNA having at least 90% sequence identity to SEQ ID NO: 54, wherein said RGN polypeptide has an amino acid sequence having at least 90% sequence identity to SEQ ID NO: 13;
[1265] n) a gRNA comprising a CRISPR repeat having at least 90% sequence identity to SEQ ID NO: 34 and a tracrRNA having at least 90% sequence identity to SEQ ID NO: 55, wherein said RGN polypeptide has an amino acid sequence having at least 90% sequence identity to SEQ ID NO: 14;
[1266] o) a gRNA comprising a CRISPR repeat having at least 90% sequence identity to SEQ ID NO: 35 and a tracrRNA having at least 90% sequence identity to SEQ ID NO: 56, wherein said RGN polypeptide has an amino acid sequence having at least 90% sequence identity to SEQ ID NO: 15;
[1267] p) a gRNA comprising a CRISPR repeat having at least 90% sequence identity to SEQ ID NO: 36 and a tracrRNA having at least 90% sequence identity to SEQ ID NO: 57, wherein said RGN polypeptide has an amino acid sequence having at least 90% sequence identity to SEQ ID NO: 16;
[1268] q) a gRNA comprising a CRISPR repeat having at least 90% sequence identity to SEQ ID NO: 37 and a tracrRNA having at least 90% sequence identity to SEQ ID NO: 58, wherein said RGN polypeptide has an amino acid sequence having at least 90% sequence identity to SEQ ID NO: 17;
[1269] r) a gRNA comprising a CRISPR repeat having at least 90% sequence identity to SEQ ID NO: 38 or 39 and a tracrRNA having at least 90% sequence identity to SEQ ID NO: 58 or 60, wherein said RGN polypeptide has an amino acid sequence having at least 90% sequence identity to SEQ ID NO: 18;
[1270] s) a gRNA comprising a CRISPR repeat having at least 90% sequence identity to SEQ ID NO: 40 and a tracrRNA having at least 90% sequence identity to SEQ ID NO: 61, wherein said RGN polypeptide has an amino acid sequence having at least 90% sequence identity to SEQ ID NO: 19; and
[1271] t) a gRNA comprising a CRISPR repeat having at least 90% sequence identity to SEQ ID NO: 41 and a tracrRNA having at least 90% sequence identity to SEQ ID NO: 62, wherein said RGN polypeptide has an amino acid sequence having at least 90% sequence identity to SEQ ID NO: 20.

[1272] 234. The method of any one of embodiments 218-230, wherein said gRNA, said first gRNA, said second gRNA, or said first gRNA and said second gRNA is selected from a gRNA selected from the group consisting of:
[1273] a) a gRNA comprising a CRISPR repeat having at least 95% sequence identity to SEQ ID NO: 21 and a tracrRNA having at least 95% sequence identity to SEQ ID NO: 42, wherein said RGN polypeptide has an amino acid sequence having at least 95% sequence identity to SEQ ID NO: 1;
[1274] b) a gRNA comprising a CRISPR repeat having at least 95% sequence identity to SEQ ID NO: 22 and a tracrRNA having at least 95% sequence identity to SEQ ID NO: 43, wherein said RGN polypeptide has an amino acid sequence having at least 95% sequence identity to SEQ ID NO: 2;
[1275] c) a gRNA comprising a CRISPR repeat having at least 95% sequence identity to SEQ ID NO: 23 and a tracrRNA having at least 95% sequence identity to SEQ ID NO: 44 or nucleotides 19-111 of SEQ ID NO: 1040, wherein said RGN polypeptide has an amino acid sequence having at least 95% sequence identity to SEQ ID NO: 3;
[1276] d) a gRNA comprising a CRISPR repeat having at least 95% sequence identity to SEQ ID NO: 24 and a tracrRNA having at least 95% sequence identity to SEQ ID NO: 45, wherein said RGN polypeptide has an amino acid sequence having at least 95% sequence identity to SEQ ID NO: 4;
[1277] e) a gRNA comprising a CRISPR repeat having at least 95% sequence identity to SEQ ID NO: 25 or nucleotides 1-17 of SEQ ID NO: 1041 or 1042, and a tracrRNA having at least 95% sequence identity to SEQ ID NO: 46 or nucleotides 22-85 of SEQ ID NO: 1041 or 1042, wherein said RGN polypeptide has an amino acid sequence having at least 95% sequence identity to SEQ ID NO: 5;
[1278] f) a gRNA comprising a CRISPR repeat having at least 95% sequence identity to SEQ ID NO: 26 and a tracrRNA having at least 95% sequence identity to SEQ ID NO: 47 or nucleotides 24-138 of SEQ ID NO: 1043, wherein said RGN polypeptide has an amino acid sequence having at least 95% sequence identity to SEQ ID NO: 6;
[1279] g) a gRNA comprising a CRISPR repeat having at least 95% sequence identity to SEQ ID NO: 27 or nucleotides 1-22 of SEQ ID NO: 1044 or 1045, and a tracrRNA having at least 95% sequence identity to SEQ ID NO: 48 or nucleotides 27-96 of SEQ ID NO 1044 or nucleotides 27-95 of SEQ ID NO: 1045, wherein said RGN polypeptide has an amino acid sequence having at least 95% sequence identity to SEQ ID NO: 7;
[1280] h) a gRNA comprising a CRISPR repeat having at least 95% sequence identity to SEQ ID NO: 28 and a tracrRNA having at least 95% sequence identity to SEQ ID NO: 49, wherein said RGN polypeptide has an amino acid sequence having at least 95% sequence identity to SEQ ID NO: 8;
[1281] i) a gRNA comprising a CRISPR repeat having at least 95% sequence identity to SEQ ID NO: 29 and a tracrRNA having at least 95% sequence identity to SEQ ID NO: 50, wherein said RGN polypeptide has an amino acid sequence having at least 95% sequence identity to SEQ ID NO: 9;
[1282] j) a gRNA comprising a CRISPR repeat having at least 95% sequence identity to SEQ ID NO: 30 and a tracrRNA having at least 95% sequence identity to SEQ ID NO: 51, wherein said RGN polypeptide has an amino acid sequence having at least 95% sequence identity to SEQ ID NO: 10;
[1283] k) a gRNA comprising a CRISPR repeat having at least 95% sequence identity to SEQ ID NO: 31 and a tracrRNA having at least 95% sequence identity to SEQ ID NO: 52, wherein said RGN polypeptide has an amino acid sequence having at least 95% sequence identity to SEQ ID NO: 11;
[1284] l) a gRNA comprising a CRISPR repeat having at least 95% sequence identity to SEQ ID NO: 32 and a tracrRNA having at least 95% sequence identity to SEQ ID NO: 53, wherein said RGN polypeptide has an amino acid sequence having at least 95% sequence identity to SEQ ID NO: 12;
[1285] m) a gRNA comprising a CRISPR repeat having at least 95% sequence identity to SEQ ID NO: 33 and a tracrRNA having at least 95% sequence identity to SEQ ID NO: 54, wherein said RGN polypeptide has an amino acid sequence having at least 95% sequence identity to SEQ ID NO: 13;
[1286] n) a gRNA comprising a CRISPR repeat having at least 95% sequence identity to SEQ ID NO: 34 and a tracrRNA having at least 95% sequence identity to SEQ ID NO: 55, wherein said RGN polypeptide has an amino acid sequence having at least 95% sequence identity to SEQ ID NO: 14;
[1287] o) a gRNA comprising a CRISPR repeat having at least 95% sequence identity to SEQ ID NO: 35 and a tracrRNA having at least 95% sequence identity to SEQ ID NO: 56, wherein said RGN polypeptide has an amino acid sequence having at least 95% sequence identity to SEQ ID NO: 15;
[1288] p) a gRNA comprising a CRISPR repeat having at least 95% sequence identity to SEQ ID NO: 36 and a tracrRNA having at least 95% sequence identity to SEQ ID NO: 57, wherein said RGN polypeptide has an amino acid sequence having at least 95% sequence identity to SEQ ID NO: 16;
[1289] q) a gRNA comprising a CRISPR repeat having at least 95% sequence identity to SEQ ID NO: 37 and a tracrRNA having at least 95% sequence identity to SEQ ID NO: 58, wherein said RGN polypeptide has an amino acid sequence having at least 95% sequence identity to SEQ ID NO: 17;
[1290] r) a gRNA comprising a CRISPR repeat having at least 95% sequence identity to SEQ ID NO: 38 or 39 and a tracrRNA having at least 95% sequence identity to SEQ ID NO: 58 or 60, wherein said RGN polypeptide has an amino acid sequence having at least 95% sequence identity to SEQ ID NO: 18;
[1291] s) a gRNA comprising a CRISPR repeat having at least 95% sequence identity to SEQ ID NO: 40 and a tracrRNA having at least 95% sequence identity to SEQ ID NO: 61, wherein said RGN polypeptide has an amino acid sequence having at least 95% sequence identity to SEQ ID NO: 19; and
[1292] t) a gRNA comprising a CRISPR repeat having at least 95% sequence identity to SEQ ID NO: 41 and a tracrRNA having at least 95% sequence identity to SEQ ID NO: 62, wherein said RGN polypeptide has an amino acid sequence having at least 95% sequence identity to SEQ ID NO: 20.

[1293] 235. The method of any one of embodiments 218-230, wherein said gRNA, said first gRNA, said second gRNA, or said first gRNA and said second gRNA is selected from a gRNA selected from the group consisting of:
[1294] a) a gRNA comprising a CRISPR repeat having at least 100% sequence identity to SEQ ID NO: 21 and a tracrRNA having at least 100% sequence identity to SEQ ID NO: 42, wherein said RGN polypeptide has an amino acid sequence having at least 100% sequence identity to SEQ ID NO: 1;
[1295] b) a gRNA comprising a CRISPR repeat having at least 100% sequence identity to SEQ ID NO: 22 and a tracrRNA having at least 100% sequence identity to SEQ ID NO: 43, wherein said RGN polypeptide has an amino acid sequence having at least 100% sequence identity to SEQ ID NO: 2;
[1296] c) a gRNA comprising a CRISPR repeat having at least 100% sequence identity to SEQ ID NO: 23 and a tracrRNA having at least 100% sequence identity to SEQ ID NO: 44 or nucleotides 19-111 of SEQ ID NO: 1040, wherein said RGN polypeptide has an amino acid sequence having at least 100% sequence identity to SEQ ID NO: 3;
[1297] d) a gRNA comprising a CRISPR repeat having at least 100% sequence identity to SEQ ID NO: 24 and a tracrRNA having at least 100% sequence identity to SEQ ID NO: 45, wherein said RGN polypeptide has an amino acid sequence having at least 100% sequence identity to SEQ ID NO: 4;
[1298] e) a gRNA comprising a CRISPR repeat having at least 100% sequence identity to SEQ ID NO: 25 or nucleotides 1-17 of SEQ ID NO: 1041 or 1042, and a tracrRNA having at least 100% sequence identity to SEQ ID NO: 46 or nucleotides 22-85 of SEQ ID NO: 1041 or 1042, wherein said RGN polypeptide has an amino acid sequence having at least 100% sequence identity to SEQ ID NO: 5;
[1299] f) a gRNA comprising a CRISPR repeat having at least 100% sequence identity to SEQ ID NO: 26 and a tracrRNA having at least 100% sequence identity to SEQ ID NO: 47 or nucleotides 24-138 of SEQ ID NO: 1043, wherein said RGN polypeptide has an amino acid sequence having at least 100% sequence identity to SEQ ID NO: 6;
[1300] g) a gRNA comprising a CRISPR repeat having at least 100% sequence identity to SEQ ID NO: 27 or nucleotides 1-22 of SEQ ID NO: 1044 or 1045, and a tracrRNA having at least 100% sequence identity to SEQ ID NO: 48 or nucleotides 27-96 of SEQ ID NO 1044 or nucleotides 27-95 of SEQ ID NO: 1045, wherein said RGN polypeptide has an amino acid sequence having at least 100% sequence identity to SEQ ID NO: 7;
[1301] h) a gRNA comprising a CRISPR repeat having at least 100% sequence identity to SEQ ID NO: 28 and a tracrRNA having at least 100% sequence identity to SEQ ID NO: 49, wherein said RGN polypeptide has an amino acid sequence having at least 100% sequence identity to SEQ ID NO: 8;
[1302] i) a gRNA comprising a CRISPR repeat having at least 100% sequence identity to SEQ ID NO: 29 and a tracrRNA having at least 100% sequence identity to SEQ ID NO: 50, wherein said RGN polypeptide has an amino acid sequence having at least 100% sequence identity to SEQ ID NO: 9;
[1303] j) a gRNA comprising a CRISPR repeat having at least 100% sequence identity to SEQ ID NO: 30 and a tracrRNA having at least 100% sequence identity to SEQ ID NO: 51, wherein said RGN polypeptide has an amino acid sequence having at least 100% sequence identity to SEQ ID NO: 10;
[1304] k) a gRNA comprising a CRISPR repeat having at least 100% sequence identity to SEQ ID NO: 31 and a tracrRNA having at least 100% sequence identity to SEQ ID NO: 52, wherein said RGN polypeptide has an amino acid sequence having at least 100% sequence identity to SEQ ID NO: 11;
[1305] l) a gRNA comprising a CRISPR repeat having at least 100% sequence identity to SEQ ID NO: 32 and a tracrRNA having at least 100% sequence identity to SEQ ID NO: 53, wherein said RGN polypeptide has an amino acid sequence having at least 100% sequence identity to SEQ ID NO: 12;
[1306] m) a gRNA comprising a CRISPR repeat having at least 100% sequence identity to SEQ ID NO: 33 and a tracrRNA having at least 100% sequence identity to SEQ ID NO: 54, wherein said RGN polypeptide has an amino acid sequence having at least 100% sequence identity to SEQ ID NO: 13;
[1307] n) a gRNA comprising a CRISPR repeat having at least 100% sequence identity to SEQ ID NO: 34 and a tracrRNA having at least 100% sequence identity to SEQ ID NO: 55, wherein said RGN polypeptide has an amino acid sequence having at least 100% sequence identity to SEQ ID NO: 14;
[1308] o) a gRNA comprising a CRISPR repeat having at least 100% sequence identity to SEQ ID NO: 35 and a tracrRNA having at least 100% sequence identity to SEQ ID NO: 56, wherein said RGN polypeptide has an amino acid sequence having at least 100% sequence identity to SEQ ID NO: 15;
[1309] p) a gRNA comprising a CRISPR repeat having at least 100% sequence identity to SEQ ID NO: 36 and a tracrRNA having at least 100% sequence identity to SEQ ID NO: 57, wherein said RGN polypeptide has an amino acid sequence having at least 100% sequence identity to SEQ ID NO: 16;
[1310] q) a gRNA comprising a CRISPR repeat having at least 100% sequence identity to SEQ ID NO: 37 and a tracrRNA having at least 100% sequence identity to SEQ ID NO: 58, wherein said RGN polypeptide has an amino acid sequence having at least 100% sequence identity to SEQ ID NO: 17;
[1311] r) a gRNA comprising a CRISPR repeat having at least 100% sequence identity to SEQ ID NO: 38 or 39 and a tracrRNA having at least 100% sequence identity to SEQ ID NO: 58 or 60, wherein said RGN polypeptide has an amino acid sequence having at least 100% sequence identity to SEQ ID NO: 18;
[1312] s) a gRNA comprising a CRISPR repeat having at least 100% sequence identity to SEQ ID NO: 40 and a tracrRNA having at least 100% sequence identity to SEQ ID NO: 61, wherein said RGN polypeptide has an amino acid sequence having at least 100% sequence identity to SEQ ID NO: 19; and
[1313] t) a gRNA comprising a CRISPR repeat having at least 100% sequence identity to SEQ ID NO: 41 and a tracrRNA having at least 100% sequence identity to SEQ ID NO: 62, wherein said RGN polypeptide has an amino acid sequence having at least 100% sequence identity to SEQ ID NO: 20.

[1314] 236. The method of any one of embodiments 218-235, wherein the cell is an animal cell.

[1315] 237. The method of embodiment 236, wherein the animal cell is a mammalian cell.

[1316] 238. The method of embodiment 236, wherein the cell is derived from a dog, cat, mouse, rat, rabbit, horse, cow, pig, or human.

[1317] 239. A method for producing a genetically modified mammalian hematopoietic progenitor cell having decreased BCL11A mRNA and protein expression, the method comprising introducing into an isolated human hematopoietic progenitor cell:
[1318] a) an RNA-guided nuclease (RGN) polypeptide, wherein the RGN polypeptide comprises an amino acid sequence having at least 90% sequence identity to any one of SEQ ID NOs: 1-20, or a polynucleotide encoding said RGN polypeptide, wherein said polynucleotide encoding the RGN polypeptide is operably linked to a promoter to enable expression of the RGN polypeptide in the cell; and
[1319] b) a guide RNA (gRNA) or a polynucleotide encoding said gRNA, wherein said polynucleotide encoding the gRNA is operably linked to a promoter to enable expression of the gRNA in the cell,
[1320] whereby the RGN and gRNA are expressed in the cell and cleave at the BCL11 A enhancer region, resulting in genetic modification of the human hematopoietic progenitor cell and reducing the mRNA and/or protein expression of BCL11 A.

[1321] 240. The method of embodiment 239, wherein said RGN polypeptide has at least 95% sequence identity to any one of SEQ ID NOs: 1-20.

[1322] 241. The method of embodiment 239, wherein said RGN polypeptide has 100% sequence identity to any one of SEQ ID NOs: 1-20.

[1323] 242. The method of embodiment 239, wherein said gRNA is selected from the group consisting of:
[1324] a) a gRNA comprising a CRISPR repeat having at least 90% sequence identity to SEQ ID NO: 21 and a tracrRNA having at least 90% sequence identity to SEQ ID NO: 42, wherein said RGN polypeptide has an amino acid sequence having at least 90% sequence identity to SEQ ID NO: 1;
[1325] b) a gRNA comprising a CRISPR repeat having at least 90% sequence identity to SEQ ID NO: 22 and a tracrRNA having at least 90% sequence identity to SEQ ID NO: 43, wherein said RGN polypeptide has an amino acid sequence having at least 90% sequence identity to SEQ ID NO: 2;
[1326] c) a gRNA comprising a CRISPR repeat having at least 90% sequence identity to SEQ ID NO: 23 and a tracrRNA having at least 90% sequence identity to SEQ ID NO: 44 or nucleotides 19-111 of SEQ ID NO: 1040, wherein said RGN polypeptide has an amino acid sequence having at least 90% sequence identity to SEQ ID NO: 3;
[1327] d) a gRNA comprising a CRISPR repeat having at least 90% sequence identity to SEQ ID NO: 24 and a tracrRNA having at least 90% sequence identity to SEQ ID NO: 45, wherein said RGN polypeptide has an amino acid sequence having at least 90% sequence identity to SEQ ID NO: 4;
[1328] e) a gRNA comprising a CRISPR repeat having at least 90% sequence identity to SEQ ID NO: 25 or nucleotides 1-17 of SEQ ID NO: 1041 or 1042, and a tracrRNA having at least 90% sequence identity to SEQ ID NO: 46 or nucleotides 22-85 of SEQ ID NO: 1041 or 1042, wherein said RGN polypeptide has an amino acid sequence having at least 90% sequence identity to SEQ ID NO: 5;
[1329] f) a gRNA comprising a CRISPR repeat having at least 90% sequence identity to SEQ ID NO: 26 and a tracrRNA having at least 90% sequence identity to SEQ ID NO: 47 or nucleotides 24-138 of SEQ ID NO: 1043, wherein said RGN polypeptide has an amino acid sequence having at least 90% sequence identity to SEQ ID NO: 6;
[1330] g) a gRNA comprising a CRISPR repeat having at least 90% sequence identity to SEQ ID NO: 27 or nucleotides 1-22 of SEQ ID NO: 1044 or 1045, and a tracrRNA having at least 90% sequence identity to SEQ ID NO: 48 or nucleotides 27-96 of SEQ ID NO 1044 or nucleotides 27-95 of SEQ ID NO: 1045, wherein said RGN polypeptide has an amino acid sequence having at least 90% sequence identity to SEQ ID NO: 7;
[1331] h) a gRNA comprising a CRISPR repeat having at least 90% sequence identity to SEQ ID NO: 28 and a tracrRNA having at least 90% sequence identity to SEQ ID NO: 49, wherein said RGN polypeptide has an amino acid sequence having at least 90% sequence identity to SEQ ID NO: 8;
[1332] i) a gRNA comprising a CRISPR repeat having at least 90% sequence identity to SEQ ID NO: 29 and a tracrRNA having at least 90% sequence identity to SEQ ID NO: 50, wherein said RGN polypeptide has an amino acid sequence having at least 90% sequence identity to SEQ ID NO: 9;
[1333] j) a gRNA comprising a CRISPR repeat having at least 90% sequence identity to SEQ ID NO: 30 and a tracrRNA having at least 90% sequence identity to SEQ ID NO: 51, wherein said RGN polypeptide has an amino acid sequence having at least 90% sequence identity to SEQ ID NO: 10;
[1334] k) a gRNA comprising a CRISPR repeat having at least 90% sequence identity to SEQ ID NO: 31 and a tracrRNA having at least 90% sequence identity to SEQ ID NO: 52, wherein said RGN polypeptide has an amino acid sequence having at least 90% sequence identity to SEQ ID NO: 11;
[1335] l) a gRNA comprising a CRISPR repeat having at least 90% sequence identity to SEQ ID NO: 32 and a tracrRNA having at least 90% sequence identity to SEQ ID NO: 53, wherein said RGN polypeptide has an amino acid sequence having at least 90% sequence identity to SEQ ID NO: 12;
[1336] m) a gRNA comprising a CRISPR repeat having at least 90% sequence identity to SEQ ID NO: 33 and a tracrRNA having at least 90% sequence identity to SEQ ID NO: 54, wherein said RGN polypeptide has an amino acid sequence having at least 90% sequence identity to SEQ ID NO: 13;
[1337] n) a gRNA comprising a CRISPR repeat having at least 90% sequence identity to SEQ ID NO: 34 and a tracrRNA having at least 90% sequence identity to SEQ ID NO: 55, wherein said RGN polypeptide has an amino acid sequence having at least 90% sequence identity to SEQ ID NO: 14;
[1338] o) a gRNA comprising a CRISPR repeat having at least 90% sequence identity to SEQ ID NO: 35 and a tracrRNA having at least 90% sequence identity to SEQ ID NO: 56, wherein said RGN polypeptide has an amino acid sequence having at least 90% sequence identity to SEQ ID NO: 15;
[1339] p) a gRNA comprising a CRISPR repeat having at least 90% sequence identity to SEQ ID NO: 36 and a tracrRNA having at least 90% sequence identity to SEQ ID NO: 57, wherein said RGN polypeptide has an amino acid sequence having at least 90% sequence identity to SEQ ID NO: 16;
[1340] q) a gRNA comprising a CRISPR repeat having at least 90% sequence identity to SEQ ID NO: 37 and a tracrRNA having at least 90% sequence identity to SEQ ID NO: 58, wherein said RGN polypeptide has an amino acid sequence having at least 90% sequence identity to SEQ ID NO: 17;
[1341] r) a gRNA comprising a CRISPR repeat having at least 90% sequence identity to SEQ ID NO: 38 and a tracrRNA having at least 90% sequence identity to SEQ ID NO: 59 or 60, wherein said RGN polypeptide has an amino acid sequence having at least 90% sequence identity to SEQ ID NO: 18;
[1342] s) a gRNA comprising a CRISPR repeat having at least 90% sequence identity to SEQ ID NO: 39 or 40 and a tracrRNA having at least 90% sequence identity to SEQ ID NO: 61, wherein said RGN polypeptide has an amino acid sequence having at least 90% sequence identity to SEQ ID NO: 19; and
[1343] t) a gRNA comprising a CRISPR repeat having at least 90% sequence identity to SEQ ID NO: 41 and a tracrRNA having at least 90% sequence identity to SEQ ID NO: 62, wherein said RGN polypeptide has an amino acid sequence having at least 90% sequence identity to SEQ ID NO: 20.

[1344] 243. The method of embodiment 239, wherein said gRNA is selected from the group consisting of:
[1345] a) a gRNA comprising a CRISPR repeat having at least 95% sequence identity to SEQ ID NO: 21 and a tracrRNA having at least 95% sequence identity to SEQ ID NO: 42, wherein said RGN polypeptide has an amino acid sequence having at least 95% sequence identity to SEQ ID NO: 1;
[1346] b) a gRNA comprising a CRISPR repeat having at least 95% sequence identity to SEQ ID NO: 22 and a tracrRNA having at least 95% sequence identity to SEQ ID NO: 43, wherein said RGN polypeptide has an amino acid sequence having at least 95% sequence identity to SEQ ID NO: 2;
[1347] c) a gRNA comprising a CRISPR repeat having at least 95% sequence identity to SEQ ID NO: 23 and a tracrRNA having at least 95% sequence identity to SEQ ID NO: 44 or nucleotides 19-111 of SEQ ID NO: 1040, wherein said RGN polypeptide has an amino acid sequence having at least 95% sequence identity to SEQ ID NO: 3;
[1348] d) a gRNA comprising a CRISPR repeat having at least 95% sequence identity to SEQ ID NO: 24 and a tracrRNA having at least 95% sequence identity to SEQ ID NO: 45, wherein said RGN polypeptide has an amino acid sequence having at least 95% sequence identity to SEQ ID NO: 4;
[1349] e) a gRNA comprising a CRISPR repeat having at least 95% sequence identity to SEQ ID NO: 25 or nucleotides 1-17 of SEQ ID NO: 1041 or 1042, and a tracrRNA having at least 95% sequence identity to SEQ ID NO: 46 or nucleotides 22-85 of SEQ ID NO: 1041 or 1042, wherein said RGN polypeptide has an amino acid sequence having at least 95% sequence identity to SEQ ID NO: 5;
[1350] f) a gRNA comprising a CRISPR repeat having at least 95% sequence identity to SEQ ID NO: 26 and a tracrRNA having at least 95% sequence identity to SEQ ID NO: 47 or nucleotides 24-138 of SEQ ID NO: 1043, wherein said RGN polypeptide has an amino acid sequence having at least 95% sequence identity to SEQ ID NO: 6;
[1351] g) a gRNA comprising a CRISPR repeat having at least 95% sequence identity to SEQ ID NO: 27 or nucleotides 1-22 of SEQ ID NO: 1044 or 1045, and a tracrRNA having at least 95% sequence identity to SEQ ID NO: 48 or nucleotides 27-96 of SEQ ID NO 1044 or nucleotides 27-95 of SEQ ID NO: 1045, wherein said RGN polypeptide has an amino acid sequence having at least 95% sequence identity to SEQ ID NO: 7;
[1352] h) a gRNA comprising a CRISPR repeat having at least 95% sequence identity to SEQ ID NO: 28 and a tracrRNA having at least 95% sequence identity to SEQ ID NO: 49, wherein said RGN polypeptide has an amino acid sequence having at least 95% sequence identity to SEQ ID NO: 8;
[1353] i) a gRNA comprising a CRISPR repeat having at least 95% sequence identity to SEQ ID NO: 29 and a tracrRNA having at least 95% sequence identity to SEQ ID NO: 50, wherein said RGN polypeptide has an amino acid sequence having at least 95% sequence identity to SEQ ID NO: 9;
[1354] j) a gRNA comprising a CRISPR repeat having at least 95% sequence identity to SEQ ID NO: 30 and a tracrRNA having at least 95% sequence identity to SEQ ID NO: 51, wherein said RGN polypeptide has an amino acid sequence having at least 95% sequence identity to SEQ ID NO: 10;
[1355] k) a gRNA comprising a CRISPR repeat having at least 95% sequence identity to SEQ ID NO: 31 and a tracrRNA having at least 95% sequence identity to SEQ ID NO: 52, wherein said RGN polypeptide has an amino acid sequence having at least 95% sequence identity to SEQ ID NO: 11;
[1356] l) a gRNA comprising a CRISPR repeat having at least 95% sequence identity to SEQ ID NO: 32 and a tracrRNA having at least 95% sequence identity to SEQ ID NO: 53, wherein said RGN polypeptide has an amino acid sequence having at least 95% sequence identity to SEQ ID NO: 12;
[1357] m) a gRNA comprising a CRISPR repeat having at least 95% sequence identity to SEQ ID NO: 33 and a tracrRNA having at least 95% sequence identity to SEQ ID NO: 54, wherein said RGN polypeptide has an amino acid sequence having at least 95% sequence identity to SEQ ID NO: 13;
[1358] n) a gRNA comprising a CRISPR repeat having at least 95% sequence identity to SEQ ID NO: 34 and a tracrRNA having at least 95% sequence identity to SEQ ID NO: 55, wherein said RGN polypeptide has an amino acid sequence having at least 95% sequence identity to SEQ ID NO: 14;
[1359] o) a gRNA comprising a CRISPR repeat having at least 95% sequence identity to SEQ ID NO: 35 and a tracrRNA having at least 95% sequence identity to SEQ ID NO: 56, wherein said RGN polypeptide has an amino acid sequence having at least 95% sequence identity to SEQ ID NO: 15;
[1360] p) a gRNA comprising a CRISPR repeat having at least 95% sequence identity to SEQ ID NO: 36 and a tracrRNA having at least 95% sequence identity to SEQ ID NO: 57, wherein said RGN polypeptide has an amino acid sequence having at least 95% sequence identity to SEQ ID NO: 16;
[1361] q) a gRNA comprising a CRISPR repeat having at least 95% sequence identity to SEQ ID NO: 37 and a tracrRNA having at least 95% sequence identity to SEQ ID NO: 58, wherein said RGN polypeptide has an amino acid sequence having at least 95% sequence identity to SEQ ID NO: 17;
[1362] r) a gRNA comprising a CRISPR repeat having at least 95% sequence identity to SEQ ID NO: 38 and a tracrRNA having at least 90% sequence identity to SEQ ID NO: 59 or 60, wherein said RGN polypeptide has an amino acid sequence having at least 95% sequence identity to SEQ ID NO: 18;
[1363] s) a gRNA comprising a CRISPR repeat having at least 95% sequence identity to SEQ ID NO: 39 or 40 and a tracrRNA having at least 95% sequence identity to SEQ ID NO: 61, wherein said RGN polypeptide has an amino acid sequence having at least 95% sequence identity to SEQ ID NO: 19; and
[1364] t) a gRNA comprising a CRISPR repeat having at least 95% sequence identity to SEQ ID NO: 41 and a tracrRNA having at least 95% sequence identity to SEQ ID NO: 62, wherein said RGN polypeptide has an amino acid sequence having at least 95% sequence identity to SEQ ID NO: 20.

[1365] 244. The method of embodiment 239, wherein said gRNA is selected from the group consisting of:
[1366] a) a gRNA comprising a CRISPR repeat having at least 100% sequence identity to SEQ ID NO: 21 and a tracrRNA having at least 100% sequence identity to SEQ ID NO: 42, wherein said RGN polypeptide has an amino acid sequence having at least 100% sequence identity to SEQ ID NO: 1;
[1367] b) a gRNA comprising a CRISPR repeat having at least 100% sequence identity to SEQ ID NO: 22 and a tracrRNA having at least 100% sequence identity to SEQ ID NO: 43, wherein said RGN polypeptide has an amino acid sequence having at least 100% sequence identity to SEQ ID NO: 2;
[1368] c) a gRNA comprising a CRISPR repeat having at least 100% sequence identity to SEQ ID NO: 23 and a tracrRNA having at least 100% sequence identity to SEQ ID NO: 44 or nucleotides 19-111 of SEQ ID NO: 1040, wherein said RGN polypeptide has an amino acid sequence having at least 100% sequence identity to SEQ ID NO: 3;
[1369] d) a gRNA comprising a CRISPR repeat having at least 100% sequence identity to SEQ ID NO: 24 and a tracrRNA having at least 100% sequence identity to SEQ ID NO: 45, wherein said RGN polypeptide has an amino acid sequence having at least 100% sequence identity to SEQ ID NO: 4;
[1370] e) a gRNA comprising a CRISPR repeat having at least 100% sequence identity to SEQ ID NO: 25 or nucleotides 1-17 of SEQ ID NO: 1041 or 1042, and a tracrRNA having at least 100% sequence identity to SEQ ID NO: 46 or nucleotides 22-85 of SEQ ID NO: 1041 or 1042, wherein said RGN polypeptide has an amino acid sequence having at least 100% sequence identity to SEQ ID NO: 5;
[1371] f) a gRNA comprising a CRISPR repeat having at least 100% sequence identity to SEQ ID NO: 26 and a tracrRNA having at least 100% sequence identity to SEQ ID NO: 47 or nucleotides 24-138 of SEQ ID NO: 1043, wherein said RGN polypeptide has an amino acid sequence having at least 100% sequence identity to SEQ ID NO: 6;
[1372] g) a gRNA comprising a CRISPR repeat having at least 100% sequence identity to SEQ ID NO: 27 or nucleotides 1-22 of SEQ ID NO: 1044 or 1045, and a tracrRNA having at least 100% sequence identity to SEQ ID NO: 48 or nucleotides 27-96 of SEQ ID NO 1044 or nucleotides 27-95 of SEQ ID NO: 1045, wherein said RGN polypeptide has an amino acid sequence having at least 100% sequence identity to SEQ ID NO: 7;
[1373] h) a gRNA comprising a CRISPR repeat having at least 100% sequence identity to SEQ ID NO: 28 and a tracrRNA having at least 100% sequence identity to SEQ ID NO: 49, wherein said RGN polypeptide has an amino acid sequence having at least 100% sequence identity to SEQ ID NO: 8;
[1374] i) a gRNA comprising a CRISPR repeat having at least 100% sequence identity to SEQ ID NO: 29 and a tracrRNA having at least 100% sequence identity to SEQ ID NO: 50, wherein said RGN polypeptide has an amino acid sequence having at least 100% sequence identity to SEQ ID NO: 9;
[1375] j) a gRNA comprising a CRISPR repeat having at least 100% sequence identity to SEQ ID NO: 30 and a tracrRNA having at least 100% sequence identity to SEQ ID NO: 51, wherein said RGN polypeptide has an amino acid sequence having at least 100% sequence identity to SEQ ID NO: 10;
[1376] k) a gRNA comprising a CRISPR repeat having at least 100% sequence identity to SEQ ID NO: 31 and a tracrRNA having at least 100% sequence identity to SEQ ID NO: 52, wherein said RGN polypeptide has an amino acid sequence having at least 100% sequence identity to SEQ ID NO: 11;
[1377] l) a gRNA comprising a CRISPR repeat having at least 100% sequence identity to SEQ ID NO: 32 and a tracrRNA having at least 100% sequence identity to SEQ ID NO: 53, wherein said RGN polypeptide has an amino acid sequence having at least 100% sequence identity to SEQ ID NO: 12;
[1378] m) a gRNA comprising a CRISPR repeat having at least 100% sequence identity to SEQ ID NO: 33 and a tracrRNA having at least 100% sequence identity to SEQ ID NO: 54, wherein said RGN polypeptide has an amino acid sequence having at least 100% sequence identity to SEQ ID NO: 13;
[1379] n) a gRNA comprising a CRISPR repeat having at least 100% sequence identity to SEQ ID NO: 34 and a tracrRNA having at least 100% sequence identity to SEQ ID NO: 55, wherein said RGN polypeptide has an amino acid sequence having at least 100% sequence identity to SEQ ID NO: 14;
[1380] o) a gRNA comprising a CRISPR repeat having at least 100% sequence identity to SEQ ID NO: 35 and a tracrRNA having at least 100% sequence identity to SEQ ID NO: 56, wherein said RGN polypeptide has an amino acid sequence having at least 100% sequence identity to SEQ ID NO: 15;
[1381] p) a gRNA comprising a CRISPR repeat having at least 100% sequence identity to SEQ ID NO: 36 and a tracrRNA having at least 100% sequence identity to SEQ ID NO: 57, wherein said RGN polypeptide has an amino acid sequence having at least 100% sequence identity to SEQ ID NO: 16;
[1382] q) a gRNA comprising a CRISPR repeat having at least 100% sequence identity to SEQ ID NO: 37 and a tracrRNA having at least 100% sequence identity to SEQ ID NO: 58, wherein said RGN polypeptide has an amino acid sequence having at least 100% sequence identity to SEQ ID NO: 17;
[1383] r) a gRNA comprising a CRISPR repeat having at least 100% sequence identity to SEQ ID NO: 38 and a tracrRNA having at least 100% sequence identity to SEQ ID NO: 59 or 60, wherein said RGN polypeptide has an amino acid sequence having at least 100% sequence identity to SEQ ID NO: 18;
[1384] s) a gRNA comprising a CRISPR repeat having at least 100% sequence identity to SEQ ID NO: 39 or 40 and a tracrRNA having at least 100% sequence identity to SEQ ID NO: 61, wherein said RGN polypeptide has an amino acid sequence having at least 100% sequence identity to SEQ ID NO: 19; and
[1385] t) a gRNA comprising a CRISPR repeat having at least 100% sequence identity to SEQ ID NO: 41 and a tracrRNA having at least 100% sequence identity to SEQ ID NO: 62, wherein said RGN polypeptide has an amino acid sequence having at least 100% sequence identity to SEQ ID NO: 20.

[1386] 245. The method of any one of embodiments 239-244, wherein the gRNA further comprises a spacer that targets a region within or proximal to the BCL11 A enhancer region.

[1387] 246. A method of treating a disease, disorder, or condition, said method comprising administering to a subject in need thereof a pharmaceutical composition of any one of embodiments 149-154 and 217.

[1388] 247. The method of embodiment 246, wherein said disease, disorder, or condition is associated with a causal mutation and said pharmaceutical composition corrects said causal mutation.

[1389] 248. The method of embodiment 246 or 247, wherein said subject is at risk of developing said disease, disorder, or condition.

[1390] 249. Use of the nucleic acid molecule of any one of embodiments 1-17, 63-67, and 79-83, the vector of any one of embodiments 18-24, 68-78, and 84-94, the cell of any one of embodiments 27-32, 97-102, 138-143, and 205-210, the RGN polypeptide of any one of embodiments 46-61, the RNP complex of embodiment 62, or the system of any one of embodiments 108-135 for the treatment of a disease, disorder, or condition in a subject in need thereof.

[1391] 250. The use of embodiment 249, wherein said disease, disorder, or condition is associated with a causal mutation and said treating comprises correcting said causal mutation.

[1392] 251. The use of embodiment 249 or 250, wherein said subject is at risk of developing said disease, disorder, or condition.

[1393] 252. Use of the nucleic acid molecule of any one of embodiments 1-17, 63-67, and 79-83, the vector of any one of embodiments 18-24, 68-78, and 84-94, the cell of any one of embodiments 27-32, 97-102, 138-143, and 205-210, the RGN polypeptide of any one of embodiments 46-61, the RNP complex of embodiment 62, or the system of any one of embodiments 108-135 for the manufacture of a medicament useful for treating a disease, disorder, or condition.

[1394] 253. The use of embodiment 252, wherein said disease is associated with a causal mutation and said medicament corrects said causal mutation.

[1395] 254. A single guide RNA comprising the nucleic acid molecule comprising said crRNA of any one of embodiments 63-67 and the nucleic acid molecule comprising said tracrRNA of any one of embodiments 79-83.

[1396] 255. A dual guide RNA comprising the nucleic acid molecule comprising said crRNA of any one of embodiments 63-67 and the nucleic acid molecule comprising said tracrRNA of any one of embodiments 79-83.

[1397] The following examples are offered by way of illustration and not by way of limitation.

### EXAMPLES

### Example 1. Identification of RNA-Guided Nuclease

[1398] Nineteen distinct CRISPR-associated RNA-guided nucleases (RGNs) were identified and are described in Table 1 below. Table 1 provides the name of each RGN, its amino acid sequence, the source from which it was derived, and processed crRNA and tracrRNA sequences (see Example 2 for methods of identification). Table 1 further provides a generic single guide RNA (sgRNA) sequence, where the poly-N indicates the location of the spacer which determines the nucleic acid target sequence of the sgRNA. Two different crRNA and tracrRNA sequences were predicted for LPG10205. For RGN systems LPG10165, LPG10190, LPG10195, LPG10196, LPG10197, LPG10203, LPG10204, LPG10205, and LPG10208, the conserved sequence in the base of the hairpin stem of the tracrRNA is UNANNC, which is set forth as SEQ ID NO: 566. For RGN system LPG10166, the conserved sequence in the base of the hairpin stem of the tracrRNA is CNANNU, which is set forth as SEQ ID NO: 569. For RGN systems LPG10167, LPG10168, LPG10171, LPG10198, and LPG10207, the conserved sequence in the base of the hairpin stem of the tracrRNA is UNANNG, which is set forth as SEQ ID NO: 567. For RGN systems LPG10169 and LPG10200, the conserved sequence in the base of the hairpin stem of the tracrRNA is CNANNC, which is set forth as SEQ ID NO: 568. For RGN system LPG10186, the conserved sequence in the base of the hairpin stem of the tracrRNA is UNANNU, which is set forth as SEQ ID NO: 570. For RGN system LPG10191, the conserved sequence in the base of the hairpin stem of the tracrRNA is CNANNG, which is set forth as SEQ ID NO: 571. For RGN system LPG10194, the conserved sequence in the base of the hairpin stem of the tracrRNA is CNCNNU, which is set forth as SEQ ID NO: 572.

TABLE 1
Summary of SEQ IDs and CRISPR associated systems

| | | | crRNA | | |
|---|---|---|---|---|---|
| | | | repeat | | sgRNA |
| | | | seq | tracrRNA | backbone* |
| | SEQ | | (SEQ | (SEQ | (SEQ |
| | ID | | ID | ID | ID |
| RGN ID | NO. | Source | NO.) | NO.) | NO) |
| LPG10165 | 1 | Bacillus cytotoxicus | 21 | 42 | 63 |
| LPG10166 | 2 | Nitrobacter | 22 | 43 | 64 |
| | | winogradskyi | | | |
| LPG10167 | 3 | Bacillus toyonensis | 23 | 44 | 65 |
| LPG10168 | 4 | Bacillus toyonensis | 24 | 45 | 66 |
| LPG10169 | 5 | Staphylococcus_{—} | 25 | 46 | 67 |
| | | Asciuri | | | |
| LPG10171 | 6 | B. mosaicus | 26 | 47 | 68 |
| LPG10186 | 7 | Contaminated | 27 | 48 | 69 |
| LPG10190 | 8 | Not Determined | 28 | 49 | 70 |
| LPG10191 | 9 | Not Determined | 29 | 50 | 71 |
| LPG10194 | 10 | Not Determined | 30 | 51 | 72 |
| LPG10195 | 11 | Not Determined | 31 | 52 | 73 |
| LPG10196 | 12 | Not Determined | 32 | 53 | 74 |
| LPG10197 | 13 | Not Determined | 33 | 54 | 75 |
| LPG10198 | 14 | Not Determined | 34 | 55 | 76 |
| LPG10200 | 15 | Not Determined | 35 | 56 | 77 |
| LPG10203 | 16 | Not Determined | 36 | 57 | 78 |
| LPG10204 | 17 | Not Determined | 37 | 58 | 79 |
| LPG10205 | 18 | Not Determined | 38, 39 | 59, 60 | 80, 81 |
| LPG10207 | 19 | Not Determined | 40 | 61 | 82 |
| LPG10208 | 20 | Not Determined | 41 | 62 | 83 |

*sgRNA backbone: crRNA repeat-linker-tracrRNA

[1399] LPG10167 can also use the LPG10167_altv1 backbone sequence set forth as SEQ ID NO: 1040. LPG10169 can also use the APG01604_altv1 backbone sequence or LPG10169_altv1 backbone sequence set forth as SEQ ID NO: 1041 or 1042, respectively. LPG10171 can also use the LPG10171_altv1 backbone sequence set forth as SEQ ID NO: 1043. LPG10186 can also use the LPG10186_altv1 backbone sequence or LPG10186_altv2 backbone sequence set forth as SEQ ID NO: 1044 or 1045, respectively.

### Example 2: Guide RNA Identification and sgRNA Construction

[1400] Guide RNAs were determined through identification of tracrRNAs and crRNAs encoded in the genomic CRISPR loci. An internal database of validated and predicted tracrRNAs was used to determine a putative RNA. When no homology-based tracrRNA could be identified, the anti-repeat portion of the tracrRNA was identified using permissive BLASTn parameters using the consensus CRISPR repeat following the protocol determined in Briner, Cold Spring Harb Protoc 7: pbd. prot086785 (2016). Manual curation of RNAs was performed using secondary structure prediction by RNAfold, an RNA folding software. sgRNA cassettes were prepared by DNA synthesis and were generally designed as follows (5′->3′): 20-30 bp spacer, operably linked at its 3′ end to the processed repeat portion of the crRNA, operably linked to a 4 bp noncomplementary linker (AAAG; SEQ ID NO: 84), operably linked at its 3′ end to the processed tracrRNA. Other 4 bp noncomplementary linkers may also be used.

[1401] For in vitro assays, sgRNAs were synthesized by in vitro transcription of the sgRNA cassettes with a GeneArt™ Precision gRNA Synthesis Kit (ThermoFisher). Processed crRNA and tracrRNA sequences for each of the RGN polypeptides are identified and are set forth in Table 1. See Example 3 for the sgRNAs constructed for PAM libraries 1 and 2.

### Example 3: Determination of PAM Requirements for Each RGN

[1402] PAM requirements for each RGN were determined using an in vitro translation PAM determination assay essentially adapted from Karvelis et al. (2015) Genome Biol 253. Briefly, two plasmid libraries (L1 and L2) were generated in a pUC18 backbone (ampR), with each containing a distinct 30 bp protospacer (target) sequence flanked by 8 random nucleotides (i.e., the PAM region). The target sequence and flanking PAM region of library 1 and library 2 for each RGN are set forth in Table 2.

[1403] Briefly, the proteins were translated in vitro using the PURExpress In Vitro Protein Synthesis kit (New England Biolabs) starting from a T7 promoter driven bacterial expression plasmid. In the presence of the appropriate sgRNA, plasmids containing a PAM that is recognizable by the RGN will be cleaved. Adapters were ligated to cleaved DNA using the NEBNext Ultra II DNA Library Prep Kit (New England Biolabs), and after cleanup, the product was PCR amplified using primers complementary to the ligated adapter and plasmid backbone sequence such that the enriched PAM sequences were contained in the amplicon. Deep sequencing (75 bp single end reads) was performed on a MiSeq (Illumina) by a service provider (MoGene, St. Louis, MO). Typically, 500,000 reads were obtained per amplicon. PAM regions were extracted, counted, and normalized to total reads for each sample. PAMs that lead to plasmid cleavage were identified by being enriched when compared to controls (i.e., the starting frequencies for the PAM in the libraries). To represent PAM requirements for a novel RGN, the depletion ratios (frequency in sample/frequency in control) for all sequences in the region in question were converted to enrichment values with a −log base 2 transformation. Sufficient PAMs were defined as those with enrichment values >3.5. PAMs above this threshold in both libraries were collected and used to generate web logos, which for example can be generated using a web-based service on the internet known as “weblogo”. PAM sequences were identified and reported when there was a consistent pattern in the top enriched PAMs. A consensus PAM (having an enrichment factor (EF) >3.5) for each RGN is provided in Table 2. The PAM orientation is also indicated in Table 2.

TABLE 2
PAM or PAM-like determination

| | sgRNA | sgRNA | PAM | |
|---|---|---|---|---|
| | L1 (SEQ | L2 (SEQ | (SEQ | PAM |
| RGN ID | ID NO.) | ID NO.) | ID NO.) | orientation |
| LPG10165 | 85 | 106 | 127 | 5′-target-PAM-3′ |
| LPG10166 | 86 | 107 | 128, 129, 130, | 5′-target-PAM-3′ |
| | | | 131 | |
| LPG10167 | 87 | 108 | 132 | 5′-target-PAM-3′ |
| LPG10168 | 88 | 109 | 132 | 5′-target-PAM-3′ |
| LPG10169 | 89 | 110 | 133 | 5′-target-PAM-3′ |
| LPG10171 | 90 | 111 | 134 | 5′-target-PAM-3′ |
| LPG10186 | 91 | 112 | 135 | 5′-target-PAM-3′ |
| LPG10190 | 92 | 113 | 136, 137 | 5′-target-PAM-3′ |
| LPG10191 | 93 | 114 | 138 | 5′-target-PAM-3′ |
| LPG10194 | 94 | 115 | 139 | 5′-target-PAM-3′ |
| LPG10195 | 95 | 116 | 140 | 5′-target-PAM-3′ |
| LPG10196 | 96 | 117 | 141 | 5′-target-PAM-3′ |
| LPG10197 | 97 | 118 | 142 | 5′-target-PAM-3′ |
| LPG10198 | 98 | 119 | 143 | 5′-target-PAM-3′ |
| LPG10200 | 99 | 120 | 144 | 5′-target-PAM-3′ |
| LPG10203 | 100 | 121 | 145 | 5′-target-PAM-3′ |
| LPG10204 | 101 | 122 | 146, 147 | 5′-target-PAM-3′ |
| LPG10205 | 102, 103 | 123, 124 | 146, 147 | 5′-target-PAM-3′ |
| LPG10207 | 104 | 125 | 132 | 5′-target-PAM-3′ |
| LPG10208 | 105 | 126 | 146, 147 | 5′-target-PAM-3′ |

### Example 4: Demonstration of Gene Editing Activity in Mammalian Cells

[1404] RGN expression cassettes were produced and introduced into vectors for mammalian expression. Each RGN was codon-optimized for human expression (SEQ ID NOs: 148-167), and operably fused at the 5′ end to an SV40 nuclear localization sequence (NLS; SEQ ID NO: 168) and to 3×FLAG tags (SEQ ID NO: 169), and operably fused at the 3′ end to nucleoplasmin NLS sequences (SEQ ID NO: 170). Two copies of the NLS sequence were used, operably fused in tandem. Each expression cassette was under control of a cytomegalovirus (CMV) promoter (SEQ ID NO: 171). It is known in the art that the CMV transcription enhancer (SEQ ID NO: 172) may also be included in constructs comprising the CMV promoter. Guide RNA expression constructs encoding a single gRNA each under the control of a human RNA polymerase III U6 promoter (SEQ ID NO: 173) were produced and introduced into the pTwist High Copy Amp vector. Sequences for the target sequences for each guide are in Table 3.

[1405] Several of the constructs described above were introduced into mammalian cells. One day prior to transfection, 1×10⁵ HEK293T cells (Sigma) were plated in 24-well dishes in Dulbecco's modified Eagle medium (DMEM) plus 10% (vol/vol) fetal bovine serum (Gibco) and 1% Penicillin-Streptomycin (Gibco). The next day when the cells were at 50-60% confluency, 500 ng of an RGN expression plasmid plus 500 ng of a single gRNA expression plasmid were co-transfected using 1.5 μL of Lipofectamine 3000 (Thermo Scientific) per well, following the manufacturer's instructions. After 48 hours of growth, total genomic DNA was harvested using a genomic DNA isolation kit (Machery-Nagel) according to the manufacturer's instructions.

[1406] The total genomic DNA was then analyzed to determine the rate of editing for each RGN for each genomic target. First, oligonucleotides were produced to be used for PCR amplification and subsequent analysis of the amplified genomic target site. Oligonucleotide sequences used are listed in Table 4.

[1407] All PCR reactions were performed using 10 μL of 2× Master Mix Phusion High-Fidelity DNA polymerase (Thermo Scientific) in a 20 μL reaction including 0.5 μM of each primer. Large genomic regions encompassing each target gene were first amplified using PCR #1 primers, using a program of: 98° C., 1 min; 30 cycles of [98° C., 10 sec; 62° C., 15 sec; 72° C., 5 min]; 72° C., 5 min; 12° C., forever. One microliter of this PCR reaction was then further amplified using primers specific for each guide (PCR #2 primers), using a program of: 98° C., 1 min; 35 cycles of [98° C., 10 sec; 67° C., 15 sec; 72° C., 30 sec]; 72° C., 5 min; 12° C., forever. Primers for PCR #2 include Nextera Read 1 and Read 2 Transposase Adapter overhang sequences for Illumina sequencing.

[1408] A number of different genes in the human genome were targeted for RNA-guided cleavage. These loci are included in Table 3 below, along with the reference to the SEQ ID NO of the sgRNA. The indel percentage, which is an indication of RGN activity, is also shown.

TABLE 3
Target and sgRNA sequences for guide RNAs used to
test gene editing activity in mammalian cells

| | | | | Target |
|---|---|---|---|---|
| | | | sgRNA | Sequence |
| Editing | Gene | | (SEQ ID | (SEQ ID |
| System | Name | Name | NO.) | NO.) |
| LPG10165 | TRAC | SGN003657 | 174 | 344 |
| LPG10165 | TRAC | SGN003656 | 175 | 345 |
| LPG10165 | TRAC | SGN003655 | 176 | 346 |
| LPG10165 | TRAC | SGN003654 | 177 | 347 |
| LPG10165 | B2M | SGN003653 | 178 | 348 |
| LPG10165 | B2M | SGN003652 | 179 | 349 |
| LPG10165 | B2M | SGN003651 | 180 | 350 |
| LPG10165 | B2M | SGN003650 | 181 | 351 |
| LPG10166 | TRAC | SGN003665 | 182 | 352 |
| LPG10166 | TRAC | SGN003664 | 183 | 353 |
| LPG10166 | TRAC | SGN003663 | 184 | 354 |
| LPG10166 | TRAC | SGN003662 | 185 | 355 |
| LPG10166 | TRAC | SGN003661 | 186 | 356 |
| LPG10166 | B2M | SGN003660 | 187 | 357 |
| LPG10166 | B2M | SGN003659 | 188 | 358 |
| LPG10166 | B2M | SGN003658 | 189 | 359 |
| LPG10167 | TRAC | SGN003673 | 190 | 360 |
| LPG10167 | TRAC | SGN003672 | 191 | 361 |
| LPG10167 | TRAC | SGN003671 | 192 | 362 |
| LPG10167 | TRAC | SGN003670 | 193 | 363 |
| LPG10167 | B2M | SGN003669 | 194 | 364 |
| LPG10167 | B2M | SGN003668 | 195 | 365 |
| LPG10167 | B2M | SGN003667 | 196 | 366 |
| LPG10167 | B2M | SGN003666 | 197 | 367 |
| LPG10169 | B2M | SGN001987 | 821 | 826 |
| LPG10169 | B2M | SGN001988 | 822 | 827 |
| LPG10169 | B2M | SGN001990 | 823 | 828 |
| LPG10169 | TRAC | SGN001991 | 824 | 829 |
| LPG10169 | TRAC | SGN001992 | 825 | 830 |
| LPG10171 | TRAC | SGN003687 | 198 | 345 |
| LPG10171 | TRAC | SGN003686 | 199 | 368 |
| LPG10171 | TRAC | SGN003685 | 200 | 369 |
| LPG10171 | TRAC | SGN003684 | 201 | 370 |
| LPG10171 | B2M | SGN003683 | 202 | 371 |
| LPG10171 | B2M | SGN003682 | 203 | 372 |
| LPG10171 | B2M | SGN003681 | 204 | 373 |
| LPG10171 | B2M | SGN003680 | 205 | 374 |
| LPG10186 | TRAC | SGN003695 | 206 | 375 |
| LPG10186 | TRAC | SGN003694 | 207 | 376 |
| LPG10186 | TRAC | SGN003693 | 208 | 377 |
| LPG10186 | TRAC | SGN003692 | 209 | 356 |
| LPG10186 | B2M | SGN003691 | 210 | 349 |
| LPG10186 | B2M | SGN003690 | 211 | 378 |
| LPG10186 | B2M | SGN003689 | 212 | 379 |
| LPG10186 | B2M | SGN003688 | 213 | 380 |
| LPG10190 | TRAC | SGN004196 | 214 | 381 |
| LPG10190 | TRAC | SGN004195 | 215 | 382 |
| LPG10190 | B2M | SGN004194 | 216 | 383 |
| LPG10190 | B2M | SGN004193 | 217 | 384 |
| LPG10190 | TRAC | SGN004192 | 218 | 385 |
| LPG10190 | TRAC | SGN004191 | 219 | 361 |
| LPG10190 | TRAC | SGN004190 | 220 | 360 |
| LPG10190 | TRAC | SGN004189 | 221 | 386 |
| LPG10190 | B2M | SGN004188 | 222 | 365 |
| LPG10190 | B2M | SGN004187 | 223 | 387 |
| LPG10190 | B2M | SGN004186 | 224 | 366 |
| LPG10190 | B2M | SGN004185 | 225 | 364 |
| LPG10191 | TRAC | SGN004205 | 226 | 388 |
| LPG10191 | TRAC | SGN004204 | 227 | 389 |
| LPG10191 | TRAC | SGN004203 | 228 | 390 |
| LPG10191 | TRAC | SGN004202 | 229 | 391 |
| LPG10191 | Dnmt3a | SGN004201 | 230 | 392 |
| LPG10191 | Dnmt3a | SGN004200 | 231 | 393 |
| LPG10191 | Dnmt3a | SGN004199 | 232 | 394 |
| LPG10191 | Dnmt3a | SGN004198 | 233 | 395 |
| LPG10191 | Dnmt3a | SGN004197 | 234 | 396 |
| LPG10194 | B2M | SGN005313 | 235 | 397 |
| LPG10194 | B2M | SGN005312 | 236 | 398 |
| LPG10194 | B2M | SGN005311 | 237 | 399 |
| LPG10194 | B2M | SGN005310 | 238 | 400 |
| LPG10194 | B2M | SGN005309 | 239 | 372 |
| LPG10194 | TRAC | SGN005308 | 240 | 401 |
| LPG10194 | TRAC | SGN005307 | 241 | 402 |
| LPG10194 | TRAC | SGN005306 | 242 | 403 |
| LPG10194 | TRAC | SGN005305 | 243 | 404 |
| LPG10194 | TRAC | SGN005304 | 244 | 405 |
| LPG10195 | B2M | SGN005323 | 245 | 406 |
| LPG10195 | B2M | SGN005322 | 246 | 372 |
| LPG10195 | B2M | SGN005321 | 247 | 407 |
| LPG10195 | B2M | SGN005320 | 248 | 408 |
| LPG10195 | B2M | SGN005319 | 249 | 409 |
| LPG10195 | TRAC | SGN005318 | 250 | 410 |
| LPG10195 | TRAC | SGN005317 | 251 | 411 |
| LPG10195 | TRAC | SGN005316 | 252 | 361 |
| LPG10195 | TRAC | SGN005315 | 253 | 360 |
| LPG10195 | TRAC | SGN005314 | 254 | 356 |
| LPG10196 | B2M | SGN005333 | 255 | 412 |
| LPG10196 | B2M | SGN005332 | 256 | 413 |
| LPG10196 | B2M | SGN005331 | 257 | 414 |
| LPG10196 | B2M | SGN005330 | 258 | 415 |
| LPG10196 | B2M | SGN005329 | 259 | 416 |
| LPG10196 | TRAC | SGN005328 | 260 | 417 |
| LPG10196 | TRAC | SGN005327 | 261 | 418 |
| LPG10196 | TRAC | SGN005326 | 262 | 419 |
| LPG10196 | TRAC | SGN005325 | 263 | 420 |
| LPG10196 | TRAC | SGN005324 | 264 | 421 |
| LPG10197 | B2M | SGN005343 | 265 | 422 |
| LPG10197 | B2M | SGN005342 | 266 | 423 |
| LPG10197 | B2M | SGN005341 | 267 | 424 |
| LPG10197 | B2M | SGN005340 | 268 | 425 |
| LPG10197 | B2M | SGN005339 | 269 | 426 |
| LPG10197 | TRAC | SGN005338 | 270 | 391 |
| LPG10197 | TRAC | SGN005337 | 271 | 427 |
| LPG10197 | TRAC | SGN005336 | 272 | 428 |
| LPG10197 | TRAC | SGN005335 | 273 | 429 |
| LPG10197 | TRAC | SGN005334 | 274 | 430 |
| LPG10198 | B2M | SGN005353 | 275 | 431 |
| LPG10198 | B2M | SGN005352 | 276 | 432 |
| LPG10198 | B2M | SGN005351 | 277 | 433 |
| LPG10198 | B2M | SGN005350 | 278 | 434 |
| LPG10198 | B2M | SGN005349 | 279 | 435 |
| LPG10198 | TRAC | SGN005348 | 280 | 436 |
| LPG10198 | TRAC | SGN005347 | 281 | 437 |
| LPG10198 | TRAC | SGN005346 | 282 | 438 |
| LPG10198 | TRAC | SGN005345 | 283 | 439 |
| LPG10198 | TRAC | SGN005344 | 284 | 440 |
| LPG10200 | B2M | SGN005363 | 285 | 441 |
| LPG10200 | B2M | SGN005362 | 286 | 442 |
| LPG10200 | B2M | SGN005361 | 287 | 426 |
| LPG10200 | B2M | SGN005360 | 288 | 443 |
| LPG10200 | B2M | SGN005359 | 289 | 379 |
| LPG10200 | TRAC | SGN005358 | 290 | 444 |
| LPG10200 | TRAC | SGN005357 | 291 | 445 |
| LPG10200 | TRAC | SGN005356 | 292 | 446 |
| LPG10200 | TRAC | SGN005355 | 293 | 447 |
| LPG10200 | TRAC | SGN005354 | 294 | 360 |
| LPG10203 | B2M | SGN005372 | 295 | 448 |
| LPG10203 | B2M | SGN005371 | 296 | 449 |
| LPG10203 | B2M | SGN005370 | 297 | 450 |
| LPG10203 | B2M | SGN005369 | 298 | 451 |
| LPG10203 | B2M | SGN005368 | 299 | 452 |
| LPG10203 | TRAC | SGN005367 | 300 | 345 |
| LPG10203 | TRAC | SGN005366 | 301 | 346 |
| LPG10203 | TRAC | SGN005365 | 302 | 347 |
| LPG10203 | TRAC | SGN005364 | 303 | 453 |
| LPG10204 | B2M | SGN005382 | 304 | 454 |
| LPG10204 | B2M | SGN005381 | 305 | 455 |
| LPG10204 | B2M | SGN005380 | 306 | 456 |
| LPG10204 | TRAC | SGN005379 | 307 | 457 |
| LPG10204 | TRAC | SGN005378 | 308 | 458 |
| LPG10204 | TRAC | SGN005377 | 309 | 459 |
| LPG10204 | TRAC | SGN005376 | 310 | 460 |
| LPG10204 | TRAC | SGN005375 | 311 | 461 |
| LPG10204 | B2M | SGN005374 | 312 | 372 |
| LPG10204 | B2M | SGN005373 | 313 | 462 |
| LPG10205 | B2M | SGN005392 | 314 | 463 |
| LPG10205 | B2M | SGN005391 | 315 | 455 |
| LPG10205 | B2M | SGN005390 | 316 | 456 |
| LPG10205 | TRAC | SGN005389 | 317 | 457 |
| LPG10205 | TRAC | SGN005388 | 318 | 458 |
| LPG10205 | TRAC | SGN005387 | 319 | 459 |
| LPG10205 | TRAC | SGN005386 | 320 | 460 |
| LPG10205 | TRAC | SGN005385 | 321 | 461 |
| LPG10205 | B2M | SGN005384 | 322 | 372 |
| LPG10205 | B2M | SGN005383 | 323 | 462 |
| LPG10207 | B2M | SGN005412 | 324 | 463 |
| LPG10207 | B2M | SGN005411 | 325 | 364 |
| LPG10207 | B2M | SGN005410 | 326 | 365 |
| LPG10207 | B2M | SGN005409 | 327 | 366 |
| LPG10207 | B2M | SGN005408 | 328 | 379 |
| LPG10207 | TRAC | SGN005407 | 329 | 447 |
| LPG10207 | TRAC | SGN005406 | 330 | 464 |
| LPG10207 | TRAC | SGN005405 | 331 | 360 |
| LPG10207 | TRAC | SGN005404 | 332 | 363 |
| LPG10207 | TRAC | SGN005403 | 333 | 361 |
| LPG10205 | B2M | SGN005393 | 334 | 462 |
| LPG10205 | B2M | SGN005394 | 335 | 372 |
| LPG10205 | TRAC | SGN005395 | 336 | 461 |
| LPG10205 | TRAC | SGN005396 | 337 | 460 |
| LPG10205 | TRAC | SGN005397 | 338 | 459 |
| LPG10205 | TRAC | SGN005398 | 339 | 458 |
| LPG10205 | TRAC | SGN005399 | 340 | 457 |
| LPG10205 | B2M | SGN005400 | 341 | 456 |
| LPG10205 | B2M | SGN005401 | 342 | 455 |
| LPG10205 | B2M | SGN005402 | 343 | 454 |

TABLE 4
Oligonucleotides for detection of gene
editing activity in mammalian cells

| | Forward | Reverse | |
|---|---|---|---|
| | Primer | Primer | |
| Primer | (SEQ | (SEQ | Targets amplified by primer (SEQ ID |
| Set | ID NO) | ID NO) | NOs.) |
| 1 | 465 | 466 | 349-351, 357-359, 364-367, 371-374, 378- |
| | | | 380, 383-384, 387, 406, 407-409, 414-416, |
| | | | 426, 431-435, 441-443, 448-452, 454-456, |
| | | | 462-463 |
| 2 | 467 | 468 | 387-400, 412-413, 422-425, 463 |
| 3 | 469 | 470 | 392 |
| 4 | 471 | 472 | 396 |
| 5 | 473 | 474 | 395 |
| 6 | 475 | 476 | 393-394 |
| 7 | 477 | 478 | 344-347, 352-356, 360-363, 368-370, 375- |
| | | | 377, 381-382, 385-391, 401-405, 410-411, |
| | | | 417-421, 427-430, 436-440, 444-447, 453, |
| | | | 457-461 |
| 8 | 479 | 480 | 464 |

[1409] Purified genomic DNA was subjected to PCR #1 and PCR #2 as above. Following the second PCR amplification, DNA was cleaned using a PCR cleanup kit (Zymo) according to the manufacturer's instructions and eluted in water. 200-500 ng of purified PCR #2 product was combined with 2 μL of 10×NEB Buffer 2 and water in a 20 μL reaction and annealed to form heteroduplex DNA using a program of: 95° C., 5 min; 95-85° C., cooled at a rate of 2° C./sec; 85-25° C., cooled at a rate of 0.1° C./sec.; 12° C., forever. Following annealing 5 μL of DNA was removed as a no enzyme control, and 1 μL of T7 Endonuclease I (NEB) was added and the reaction incubated at 37° C. for 1 hr. After incubation 5× FlashGel loading dye (Lonza) was added and 5 μL of each reaction and controls were analyzed by a 2.2% agarose FlashGel (Lonza) using gel electrophoresis. Following visualization of the gel, the percentage of non-homologous end joining (NHEJ) was determined using the following equation: % NHEJ events=100×[1−(1-fraction cleaved)(½)], where (fraction cleaved) is defined as: (density of digested products)/(density of digested products+undigested parental band).

[1410] Additionally, products from PCR #2 containing Illumina overhang sequences underwent library preparation following the Illumina 16S Metagenomic Sequencing Library protocol. Deep sequencing was performed on an Illumina Mi-Seq platform by a service provider (MOGene). Typically, 200,000 of 250 bp paired-end reads (2×100,000 reads) are generated per amplicon. The reads were analyzed using CRISPResso (Pinello, et al. 2016 Nature Biotech, 34:695-697) to calculate the rates of editing. Output alignments were hand-curated to confirm insertion and deletion sites as well as identify microhomology sites at the recombination sites. The rates of editing are shown in Table 5. All experiments were performed in human cells. A selected example of mammalian genome editing is shown in Table 5.

TABLE 5
Editing Rates for RGNs in Mammalian Cells

| Name | Guide Name | Percent Indels |
|---|---|---|
| LPG10166 | SGN003661 | 0.24 |
| LPG10166 | SGN003662 | 0 |
| LPG10166 | SGN003663 | 0 |
| LPG10166 | SGN003664 | 0 |
| LPG10166 | SGN003665 | 0.13 |
| LPG10167 | SGN003666 | 0.14 |
| LPG10167 | SGN003667 | 1.16 |
| LPG10167 | SGN003668 | 0.79 |
| LPG10167 | SGN003669 | 0.34 |
| LPG10167 | SGN003670 | 0 |
| LPG10167 | SGN003671 | 0 |
| LPG10167 | SGN003672 | 0.21 |
| LPG10167 | SGN003673 | 0.16 |
| LPG10168 | SGN003666 | 0.16 |
| LPG10168 | SGN003668 | 0.61 |
| LPG10168 | SGN003669 | 3.68 |
| LPG10168 | SGN003670 | 0 |
| LPG10168 | SGN003671 | 0 |
| LPG10168 | SGN003672 | 0 |
| LPG10168 | SGN003673 | 0.31 |
| LPG10169 | SGN001987 | 40.09 |
| LPG10169 | SGN001988 | 13.03 |
| LPG10169 | SGN001990 | 3.9 |
| LPG10169 | SGN001991 | 2.53 |
| LPG10169 | SGN001992 | 0.56 |
| LPG10171 | SGN003680 | 0.22 |
| LPG10171 | SGN003681 | 0.96 |
| LPG10171 | SGN003682 | 15.16 |
| LPG10171 | SGN003683 | 12.13 |
| LPG10171 | SGN003684 | 0.05 |
| LPG10171 | SGN003685 | 0 |
| LPG10171 | SGN003686 | 0 |
| LPG10171 | SGN003687 | 0.25 |
| LPG10186 | SGN003688 | 0 |
| LPG10186 | SGN003689 | 8.93 |
| LPG10186 | SGN003690 | 0 |
| LPG10186 | SGN003691 | 0.89 |
| LPG10186 | SGN003692 | 0.69 |
| LPG10186 | SGN003693 | 0 |
| LPG10186 | SGN003694 | 0 |
| LPG10186 | SGN003695 | 0.06 |

### Example 5: Testing Different Delivery Formats

[1411] To determine if the RGNs are capable of delivery in different formats, mRNA and RNP nucleofection delivery was tested with primary T-cells. Purified CD3+ T-cells or peripheral blood mononuclear cells (PBMCs) were thawed, activated using CD3/CD28 beads (ThermoFisher) for 3 days, then nucleofected using the Lonza 4D-Nucleofector X unit and Nucleocuvette strips. The P3 Primary Cell kit was used for both mRNA and RNP delivery. Cells were transfected using the EO-115 and EH-115 programs for mRNA and RNP delivery respectively. Cells were cultured in CTS OpTimizer T cell expansion medium (ThermoFisher) containing IL-2, IL-7, and IL-15 (Miltenyi Biotec) for 4 days post nucleofection before being harvested using a Nucleospin Tissue genomic DNA isolation kit (Machery Nagel).

[1412] Amplicons surrounding the editing sites were generated by PCR using primers identified in Table 4 and subjected to NGS sequencing using the Illumina Nextera platform using 2×250 bp paired end sequencing following the method in Example 4.

### Example 6: Identification of Disease Targets

[1413] A database of clinical variants was obtained from NCBI ClinVar database, which is available through the world wide web at the NCBI ClinVar website. Pathogenic Single Nucleotide Polymorphisms (SNPs) were identified from this list. Using the genomic locus information, CRISPR targets in the region overlapping and surrounding each SNP were identified. A selection of SNPs that can be corrected using base editing in combination with the RGNs of the invention to target the causal mutation (“Casl Mut.”) is listed in Table 6. In Table 6, only one alias of each disease is listed. The “RS #” corresponds to the RS accession number through the SNP database at the NCBI website. The AlleleID corresponds to a causal allele accession number, and the Chromosome Accession number also provides accession reference information found through the NCBI website. Table 6 also provides genomic target sequence information suitable for the RGN listed for each disease. The target sequence information also provides a sample protospacer sequence for the production of the necessary sgRNA, along with the presently disclosed crRNA repeat and tracrRNA sequences for the corresponding RGN.

TABLE 6
Disease Targets for RGNs

| | RS# | | Casl. | Allele | | Target Sequence |
|---|---|---|---|---|---|---|
| Disease | (dbSNP) | RGN | Mut | ID | Gene | (SEQ ID NO) |
| Stargardt disease | 1800553 | LPG10166 | G > A | 22927 | ABCA4 | 573 |
| Stargardt disease | 1800553 | LPG10167, LPG10168, LPG10207 | G > A | 22927 | ABCA4 | 574 |
| Stargardt disease | 1800553 | LPG10171 | G > A | 22927 | ABCA4 | 575 |
| Stargardt disease | 1800553 | LPG10186 | G > A | 22927 | ABCA4 | 576 |
| Stargardt disease | 1800553 | LPG10190 | G > A | 22927 | ABCA4 | 577 |
| Stargardt disease | 1800553 | LPG10194 | G > A | 22927 | ABCA4 | 578 |
| Stargardt disease | 1800553 | LPG10195 | G > A | 22927 | ABCA4 | 579 |
| Stargardt disease | 1800553 | LPG10200 | G > A | 22927 | ABCA4 | 580 |
| Stargardt disease | 1800553 | LPG10203 | G > A | 22927 | ABCA4 | 581 |
| Stargardt disease | 1800553 | LPG10204, LPG10205, LEG206 | G > A | 22927 | ABCA4 | 582 |
| Phenylketonuria | 5030857 | LPG10191 | C > T | 98638 | PAH | 583 |
| Phenylketonuria | 5030858 | LPG10166 | C > T | 15616 | PAH | 584 |
| Phenylketonuria | 5030858 | LPG10167, LPG10168, LPG10207 | C > T | 15616 | PAH | 585 |
| Phenylketonuria | 5030858 | LPG10171 | C > T | 15616 | PAH | 586 |
| Phenylketonuria | 5030858 | LPG10186 | C > T | 15616 | PAH | 587 |
| Phenylketonuria | 5030858 | LPG10190 | C > T | 15616 | PAH | 588 |
| Phenylketonuria | 5030858 | LPG10195 | C > T | 15616 | PAH | 589 |
| Phenylketonuria | 5030858 | LPG10197 | C > T | 15616 | PAH | 590 |
| Phenylketonuria | 5030858 | LPG10198 | C > T | 15616 | PAH | 591 |
| Phenylketonuria | 5030858 | LPG10200 | C > T | 15616 | PAH | 592 |
| Hyperphenylalaninemia, non-pku | 5030860 | LPG10203 | A > G | 15632 | PAH | 593 |
| Alpha-1-antitrypsin deficiency | 28929474 | LPG10166 | G > A | 33006 | SERPINA1 | 594 |
| Alpha-1-antitrypsin deficiency | 28929474 | LPG10167, LPG10168, LPG10207 | G > A | 33006 | SERPINA1 | 595 |
| Alpha-1-antitrypsin deficiency | 28929474 | LPG10171 | G > A | 33006 | SERPINA1 | 596 |
| Alpha-1-antitrypsin deficiency | 28929474 | LPG10186 | G > A | 33006 | SERPINA1 | 597 |
| Alpha-1-antitrypsin deficiency | 28929474 | LPG10190 | G > A | 33006 | SERPINA1 | 598 |
| Alpha-1-antitrypsin deficiency | 28929474 | LPG10194 | G > A | 33006 | SERPINA1 | 599 |
| Alpha-1-antitrypsin deficiency | 28929474 | LPG10196 | G > A | 33006 | SERPINA1 | 600 |
| Alpha-1-antitrypsin deficiency | 28929474 | LPG10200 | G > A | 33006 | SERPINA1 | 601 |
| Alpha-1-antitrypsin deficiency | 28929474 | LPG10203 | G > A | 33006 | SERPINA1 | 602 |
| Carbohydrate-deficient | 28936415 | LPG10166 | G > A | 22745 | PMM2 | 603 |
| glycoprotein syndrome type I | | | | | | |
| Carbohydrate-deficient | 28936415 | LPG10169 | G > A | 22745 | PMM2 | 604 |
| glycoprotein syndrome type I | | | | | | |
| Carbohydrate-deficient | 28936415 | LPG10171 | G > A | 22745 | PMM2 | 605 |
| glycoprotein syndrome type I | | | | | | |
| Carbohydrate-deficient | 28936415 | LPG10186 | G > A | 22745 | PMM2 | 606 |
| glycoprotein syndrome type I | | | | | | |
| Carbohydrate-deficient | 28936415 | LPG10195 | G > A | 22745 | PMM2 | 607 |
| glycoprotein syndrome type I | | | | | | |
| Carbohydrate-deficient | 28936415 | LPG10197 | G > A | 22745 | PMM2 | 608 |
| glycoprotein syndrome type I | | | | | | |
| Carbohydrate-deficient | 28936415 | LPG10200 | G > A | 22745 | PMM2 | 609 |
| glycoprotein syndrome type I | | | | | | |
| Familial Mediterranean fever | 28940579 | LPG10191 | T > C | 17579 | MEFV | 610 |
| Carnitine palmitoyltransferase II | 74315294 | LPG10171 | C > T | 23992 | CPT2 | 611 |
| deficiency | | | | | | |
| Carnitine palmitoyltransferase II | 74315294 | LPG10186 | C > T | 23992 | CPT2 | 612 |
| deficiency | | | | | | |
| Carnitine palmitoyltransferase II | 74315294 | LPG10190 | C > T | 23992 | CPT2 | 613 |
| deficiency | | | | | | |
| Carnitine palmitoyltransferase II | 74315294 | LPG10200 | C > T | 23992 | CPT2 | 614 |
| deficiency | | | | | | |
| Carnitine palmitoyltransferase II | 74315294 | LPG10203 | C > T | 23992 | CPT2 | 615 |
| deficiency | | | | | | |
| Carnitine palmitoyltransferase II | 74315294 | LPG10204, LPG10205, LEG206 | C > T | 23992 | CPT2 | 616 |
| deficiency | | | | | | |
| Deafness | 80338945 | LEG165 | T > C | 32055 | GJB2 | 617 |
| Deafness | 80338945 | LEG165 | T > C | 32055 | GJB2 | 618 |
| Deafness | 80338945 | LPG10166 | T > C | 32055 | GJB2 | 619 |
| Deafness | 80338945 | LPG10167, LPG10168, LPG10207 | T > C | 32055 | GJB2 | 620 |
| Deafness | 80338945 | LPG10169 | T > C | 32055 | GJB2 | 621 |
| Deafness | 80338945 | LPG10171 | T > C | 32055 | GJB2 | 622 |
| Deafness | 104894396 | LPG10186 | G > A | 32041 | GJB2 | 623 |
| Deafness | 104894396 | LPG10190 | G > A | 32041 | GJB2 | 624 |
| Deafness | 104894396 | LPG10194 | G > A | 32041 | GJB2 | 625 |
| Deafness | 104894396 | LPG10195 | G > A | 32041 | GJB2 | 626 |
| Deafness | 104894396 | LPG10196 | G > A | 32041 | GJB2 | 627 |
| Deafness | 104894396 | LPG10200 | G > A | 32041 | GJB2 | 628 |
| Deafness | 104894396 | LPG10204, LPG10205, LEG206 | G > A | 32041 | GJB2 | 629 |
| Familial hypercholesterolemia | 121908026 | LPG10190 | C > T | 18725 | LDLR | 630 |
| Familial hypercholesterolemia | 121908026 | LPG10203 | C > T | 18725 | LDLR | 631 |
| Familial hypercholesterolemia | 137929307 | LPG10186 | G > A | 171217 | LDLR | 632 |
| Familial hypercholesterolemia | 137929307 | LPG10194 | G > A | 171217 | LDLR | 633 |
| Familial hypercholesterolemia | 137929307 | LPG10195 | G > A | 171217 | LDLR | 634 |
| Familial hypercholesterolemia | 137929307 | LPG10196 | G > A | 171217 | LDLR | 635 |
| Familial hypercholesterolemia | 137929307 | LPG10200 | G > A | 171217 | LDLR | 636 |
| Noonan syndrome | 267607048 | LEG165 | A > G | 21860 | SHOC2 | 637 |
| Noonan syndrome | 267607048 | LPG10169 | A > G | 21860 | SHOC2 | 638 |
| Noonan syndrome | 267607048 | LPG10195 | A > G | 21860 | SHOC2 | 639 |
| Noonan syndrome | 267607048 | LPG10197 | A > G | 21860 | SHOC2 | 640 |
| Noonan syndrome | 267607048 | LPG10200 | A > G | 21860 | SHOC2 | 641 |

### Example 7: Targeting Mutations Responsible for Hurler Syndrome

[1414] The following describes a potential treatment for Hurler Syndrome, also referred to as MPS-1, using an RNA directed base editing system that corrects a mutation responsible for Hurler syndrome in a large proportion of patients with the disease. This approach utilizes a base editing fusion protein that is RNA guided and that can be packaged into a single AAV vector for delivery to a wide range of tissue types. Depending on the exact regulatory elements and base editor domain used, it may also be possible to engineer a single vector that encodes for both the base editing fusion protein and a single guide RNA to target the diseased locus.

### Example 7.1: Identifying RGN with Ideal PAM

[1415] The genetic disease MPS-1 is a lysosomal storage disease characterized at the molecular level by the accumulation of dermatan sulfate and heparan sulfate in lysosomes. This disease is generally an inherited genetic disorder caused by mutations in the IDUA gene (NCBI Reference sequence NG_008103.1), which encodes α-L-iduronidase. The disease is a result of a deficiency of α-L-iduronidase. The most common IDUA mutations found in studies of individuals of Northern European background are W402X and Q70X, both nonsense mutations resulting in premature termination of translation (Bunge et al. (1994), Hum. Mol. Genet, 3(6): 861-866, herein incorporated by reference). Reversion of a single nucleotide would restore the wild-type coding sequence and result in protein expression controlled by the endogenous regulatory mechanisms of the genetic locus.

[1416] The W402X mutation of the human Idua gene accounts for a high proportion of MPS-1H cases. Base editors can target a narrow sequence window relative to the binding site of the protospacer component of the guide RNA and thus the presence of a PAM sequence a specific distance from the target locus is essential for the success of the strategy. Given the constraints that the target mutation must be on the exposed non-target strand (NTS) during the interaction of the base editing protein and that the footprint of the RGN domain will block access to the region near the PAM, an accessible locus is thought to be 10-30 bp from the PAM. To avoid editing and mutagenesis of other nearby adenosine bases in this window, different linkers are screened. The ideal window is 12-16 bp from the PAM.

[1417] PAM sequences compatible with LPG10165, LPG10167, LPG10168, LPG10207, LPG10171, LPG10186, LPG10190, LPG10194, LPG10195, LPG10200, or LPG10203 are readily apparent at the genetic locus. These nucleases have a PAM sequence of 5′ nnnnGRRA-3′ (SEQ ID NO: 127), 5′-nnnnCC-3′ (SEQ ID NO: 132), 5′-nnnnGnnA-3′ (SEQ ID NO: 134)), 5′-nVG-3′ (SEQ ID NO: 135), 5′-nnnnCCD-3′ (SEQ ID NO: 136), 5′-VGGNR-3′ (SEQ ID NO: 139), 5′-NNRA-3′ (SEQ ID NO: 140), 5′-nGR-3′ (SEQ ID NO: 144) and 5′-nnnnGGG-3′ (SEQ ID NO: 145) respectively.

[1418] Cas9 from S. pyogenes (SpyCas9) requires a PAM sequence of NGG (SEQ ID NO: 642), which is present near the W402X locus, but the size of SpyCas9 prevents packaging into a single AAV vector, and thus forgoes the aforementioned advantages of this approach. While a dual delivery strategy may be employed (for example, Ryu et al, (2018), Nat. Biotechnol., 36(6): 536-539, herein incorporated by reference), it would add significant manufacturing complexity and cost. Additionally, dual viral vector delivery significantly decreases the efficiency of gene correction, since a successful edit in a given cell requires infection with both vectors and assembly of the fusion protein in the cell.

[1419] A commonly used Cas9 ortholog from S. aureus (SauCas9) is considerably smaller in size relative to SpyCas9 but has a more complex PAM requirement—NGRRT (SEQ ID NO: 643). This sequence is not within a range expected to be useful for base editing of the causative locus.

### Example 7.2: RGN Fusion Constructs and sgRNA Sequences

[1420] A DNA sequence encoding a fusion protein with the following domains is produced using standard molecular biology techniques: 1) an RGN domain with mutations that inactivate the DNA cleavage activity (“dead” or “nickase”); 2) an adenosine deaminase useful for base editing. All constructs described in the table below comprise a fusion protein with the base editing active domain, in this example LPG50148 (SEQ ID NO: 644), operably fused to the N-terminal end of a nickase version of RGN LPG10165, LPG10167, LPG10168, LPG10171, LPG10186, LPG10190, LPG10194, LPG10195, LPG10200, LPG10203, or LPG10207 (set forth as SEQ ID NOs: 645-655, respectively). Other adenosine deaminases useful for base editing DNA may also be used (see for example PCT Application Publication Nos. WO 2020/139783 and WO 2022/056254, each of which is herein incorporated by reference in its entirety). It is known in the art that a fusion protein could also be made with the base-editing enzyme at the C-terminal end of the RGN. Additionally, the RGN and the base editor of the fusion protein are typically separated by a linker amino sequence. It is known in the art that lengths of standard linkers range from 15-30 amino acids.

TABLE 7
Constructs for RNA-targeted base editing

| SEQ ID | | | Dead (D)or | Base |
|---|---|---|---|---|
| NO. | Construct | RGN | Nickase (N) | editor |
| 656 | SV40-LPG50148-Linker- | LPG10165 | N | LPG50148 |
| | nLPG10165 -Linker-Nuc | | | |
| 657 | SV40-LPG50148-Linker- | LPG10167 | N | LPG50148 |
| | nLPG10167 -Linker-Nuc | | | |
| 658 | SV40-LPG50148-Linker- | LPG10168 | N | LPG50148 |
| | nLPG10168 -Linker-Nuc | | | |
| 659 | SV40-LPG50148-Linker- | LPG10171 | N | LPG50148 |
| | nLPG10171 -Linker-Nuc | | | |
| 660 | SV40-LPG50148-Linker- | LPG10186 | N | LPG50148 |
| | nLPG10186 -Linker-Nuc | | | |
| 661 | SV40-LPG50148-Linker- | LPG10190 | N | LPG50148 |
| | nLPG10190 -Linker-Nuc | | | |
| 662 | SV40-LPG50148-Linker- | LPG10194 | N | LPG50148 |
| | nLPG10194 -Linker-Nuc | | | |
| 663 | SV40-LPG50148-Linker- | LPG10195 | N | LPG50148 |
| | nLPG10195 -Linker-Nuc | | | |
| 664 | SV40-LPG50148-Linker- | LPG10200 | N | LPG50148 |
| | nLPG10200 -Linker-Nuc | | | |
| 665 | SV40-LPG50148-Linker- | LPG10203 | N | LPG50148 |
| | nLPG10203 -Linker-Nuc | | | |
| 666 | SV40-LPG50148-Linker- | LPG10207 | N | LPG50148 |
| | nLPG10207 -Linker-Nuc | | | |

[1421] The accessible editing sites of an RGN are determined by the PAM sequence. When combining an RGN with a base editing domain, the target residue for editing must reside on the non-target strand (NTS), since the NTS is single stranded while the RGN is associated with the locus. Evaluating a number of nucleases and corresponding guide RNAs enables the selection of the most appropriate gene editing tool for this particular locus. Several potential PAM sequences that can be targeted by the constructs described above in the human Idua gene are in the proximity of the mutant nucleotide responsible for the W402X mutation. A sequence encoding a guide RNA transcript containing 1) a “spacer” that is complementary to the non-coding DNA strand at the disease locus; and 2) RNA sequence required for association of the guide RNA with the RGN is also produced. Non-limiting exemplary spacers would be complementary to the non-coding DNA strand of the target sequences set forth as SEQ ID NOs: 667-677 for the RGNs LPG10165, LPG10167, LPG10168, LPG10207, LPG10171, LPG10186, LPG10190, LPG10194, LPG10195, LPG10200, LPG10203. Non-limiting examples of sgRNA molecules include those comprising such spacers and the crRNA repeat and tracrRNA sequences disclosed herein for the corresponding RGN, and similar sgRNAs that may be devised by one of skill in the art, can be evaluated for their efficiency in directing the base editors above to the locus of interest.

### Example 7.3: Assay for Activity in Cells from Hurler Disease Patients

[1422] To verify the genotype strategy and evaluate the constructs described above, fibroblasts from Hurler disease patients are used. A vector is designed containing appropriate promoters upstream of the fusion protein coding sequence and the sgRNA encoding sequence for expression of these in human cells, similar to those vectors described in Example 4. It is recognized that promoters and other DNA elements (for example enhancers, or terminators) which either are known for high levels of expression in human cells or may specifically express well in fibroblast cells may also be used. The vector is transfected into the fibroblasts using standard techniques, for example transfection similar to what is described in Example 4. Alternatively, electroporation may be used. The cells are cultured for 1-3 days. Genomic DNA (gDNA) is isolated using standard techniques. The editing efficiency is determined by performing a qPCR genotyping assay and/or next generation sequencing on the purified gDNA, as described further below.

[1423] Tagman™ qPCR analysis utilizes probes specific for the wild-type and mutant allele. These probes bear fluorophores which are resolved by their spectral excitation and/or emission properties using a qPCR instrument. A genotyping kit containing PCR primers and probes can be obtained commercially (i.e., Thermo Fisher Tagman™ SNP genotyping assayID C_27862753_10 for SNP ID rs121965019) or designed. An example of a designed primer and probe set is shown in Table 8.

TABLE 8
RT-PCR primers and probes

| | | SEQ |
|---|---|---|
| Description | Sequence | ID NO. |
| Forward | 5′-GACTCCTTCACCAAG-3′ | 678 |
| Amplification | | |
| Primer | | |
| Reverse | 5′-GTAGATCAGCACCG-3′ | 679 |
| Amplification | | |
| Primer | | |
| Wild Type | 5′-CTCTGGGCCGAAGT-3′ | 680 |
| Probe | | |
| W402X Probe | 5′-CTCTAGGCCGAAGT-3′ | 681 |

[1424] Following the editing experiment, the gDNA is subjected to qPCR analysis using standard methods and the primers and probes described above. Expected results are shown in Table 9. This in vitro system can be used to expediently evaluate constructs and choose one with high editing efficiency for further studies. The systems will be evaluated in comparison with cells with and without the W402X mutation, and preferably with some that are heterozygous for this mutation. The Ct values will be compared to either a reference gene or the total amplification of the locus using a dye such as Sybr green.

TABLE 9
Expected qPCR results

| | Transfected with | |
|---|---|---|
| Genotype | base editor | Expected PCR result |
| Idua^{WT/WT} | No | Homozygous WT |
| Idua^{WT/W402X} | No | Heterozygous: 50% WT, 50% |
| | | W402X |
| Idua^{W402X/W402X} | No | Homozygous W402X |
| Idua^{W402X/W402X} | Yes | Variable |

[1425] The tissues can also be analyzed by next generation sequencing. Primer binding sites such as the ones shown below (Table 10), or other suitable primer binding sites that can be identified by a person of skill in the art, can be used. Following PCR amplification, products containing Illumina Nextera XT overhang sequences undergo library preparation following the Illumina 16S Metagenomic Sequencing Library protocol. Deep sequencing is performed on an Illumina Mi-Seq platform. Typically, 200,000 of 250 bp paired-end reads (2×100,000 reads) are generated per amplicon. The reads are analyzed using CRISPResso (Pinello et al., 2016) to calculate the rates of editing. Output alignments are hand-curated to confirm insertion and deletion sites as well as identify microhomology sites at the recombination sites.

TABLE 10
NGS primer binding sites

| Direction | Sequence | SEQ ID NO. |
|---|---|---|
| Forward | 5′-ACTTCCTCCAGCC-3′ | 682 |
| Reverse | 5′-GAACCCCGGCTTA-3′ | 683 |

[1426] Western blotting of cell lysate of transfected cells and control cells using an anti-IDUA antibody is performed to verify expression of the full-length protein and an enzyme activity assay on the cell lysate using substrate 4-methylumbelliferyl α-L-iduronide verifies that the enzyme is catalytically active (Hopwood et al., Clin. Chim. ACta (1979), 92(2): 257-265, incorporated by reference herein). These experiments are performed in comparison with the original Idua^{W402X/W402X} cell line (without transfection), the Idua^{W42X/w402X} cell line transfected with the base editing construct and a random guide sequence, and a cell line expressing wild-type IDUA.

### Example 7.4: Disease Treatment Validation in a Murine Model

[1427] To verify the efficacy of this therapeutic approach, a mouse model with a nonsense mutation in the analogous amino acid is used. The mouse strain bears a W392X mutation in its Idua gene (Gene ID: 15932) which corresponds to the homologous mutation in Hurler syndrome patients (Bunge et al., (1994), Hum. Mol. Genet. 3(6): 861-866, incorporated by reference herein). This locus comprises a distinct nucleotide sequence relative to that in humans, which lacks the PAM sequence necessary for correction with the base editors described in the previous examples, and thus necessitates design of a distinct fusion protein to perform the nucleotide correction. Amelioration of the disease in this animal can validate the therapeutic approach of correcting the mutation in tissues accessible by a gene delivery vector.

[1428] Mice homozygous for this mutation display a number of phenotypic characteristics similar to Hurler syndrome patients. A base editing-RGN fusion protein as described above (Table 7) along with an RNA guide sequence are incorporated into an expression vector that allows protein expression and RNA transcription in mice. A study design is shown below in Table 11. The study includes groups that are treated with a high dose of the expression vector comprising the base-editing fusion protein and RNA guide sequence, a low dose of same expression vector, control which is the model mouse treated with an expression vector that does not comprise the base editing fusion protein or the guide RNA, and a second control which is a wild type mouse treated with the same empty vector.

TABLE 11
Genome editing experiment in murine model

| Group | Mouse strain | N | Treatment |
|---|---|---|---|
| 1 | Idua-W392X¹ | ≥5 | Low dose of vector |
| 2 | Idua-W392X | ≥5 | High dose of vector |
| 3 | Idua-W392X | ≥5 | Vehicle |
| 4 | 129/Sv (WT) | 5 | Vehicle |

[1429] Endpoints to evaluate include body weight, urine GAG excretion, serum IDUA enzymatic activity, IDUA activity in tissues of interest, tissue pathology, genotyping of tissues of interest to verify correction of the SNP, and behavioral and neurological evaluation. Since some endpoints are terminal, additional groups may be added for evaluation of, for example, tissue pathology and tissue IDUA activities before the end of the study. Additional examples of endpoints can be found in published papers establishing Hurler syndrome animal models (Shull et al. (1994), Proc. Natl. Acad. Sci. U.S.A., 91(26): 12937-12941; Wang et al. (2010), Mol. Genet. Metab., 99(1): 62-71; Hartung et al. (2004), Mol. Ther., 9(6): 866-875; Liu et al. (2005), Mol. Ther., 11(1): 35-47; Clarke et al. (1997), Hum. Mol. Genet. 6(4): 503-511; all herein incorporated by reference).

[1430] One possible delivery vector utilizes the adeno associated virus (AAV). A vector is produced to include a base editor-dRGN or base editor-nRGN fusion protein coding sequence (for example, those described in Table 7) preceded by a CMV enhancer (SEQ ID NO: 172) and promoter (SEQ ID NO: 171), or other suitable enhancer and promoter combination), optionally a Kozak sequence, and operably fused at the 3′ end to a terminator sequence and a poly-adenylation sequence such as the minimal sequence described in Levitt, N.; Briggs, D.; Gil, A.; Proudfoot, N. J. Definition of an Efficient Synthetic Poly(A) Site. Genes Dev. 1989, 3 (7), 1019-1025. The vector may further comprise an expression cassette encoding for a single guide RNA operably linked at its 5′ end to a human U6 promoter (SEQ ID NO: 173) or another promoter suitable for production of small non-coding RNAs, and further comprising inverted terminal repeat (ITR) sequences necessary and well-known in the art for packaging into the AAV capsid. Production and viral packaging is performed by standard methods, such as those described in U.S. Pat. No. 9,587,250, herein incorporated by reference.

[1431] Other possible viral vectors include adenovirus and lentivirus vectors, which are commonly used and would contain similar elements, with different packaging capabilities and requirements. Non-viral delivery methods also be used, such as mRNA and sgRNA encapsulated by lipid nanoparticles (Cullis, P. R. and Allen, T. M. (2013), Adv. Drug Deliv. Rev. 65(1): 36-48; Finn et al. (2018), Cell Rep. 22(9): 2227-2235, both incorporated by reference) hydrodynamic injection of plasmid DNA (Suda T and Liu D,) 2007) Mol. Ther. 15(12): 2063-2069, herein incorporated by reference), or ribonucleoprotein complexes of sgRNA and associated with gold nanoparticles (Lee, K.; Conboy, M.; Park, H. M.; Jiang, F.; Kim, H. J.; Dewitt, M. A.; Mackley, V. A.; Chang, K.; Rao, A.; Skinner, C.; et al. Nanoparticle Delivery of Cas9 Ribonucleoprotein and Donor DNA in Vivo Induces Homology-Directed DNA Repair. Nat. Biomed. Eng. 2017, 1 (11), 889-90).

### Example 7.5: Disease Correction in a Murine Model with a Humanized Locus

[1432] To evaluate the efficacy of an identical base editor construct as would be used for human therapy, a mouse model in which the nucleotides near W392 are altered to match the sequence in humans around W402 is needed. This can be accomplished by a variety of techniques, including use of an RGN and an HDR template to cut and replace the locus in mouse embryos.

[1433] Due to the high degree of amino acid conservation, most nucleotides in the mouse locus can be altered to those of the human sequence with silent mutations as shown in Table 12. The only base changes resulting in altered coding sequence in the resulting engineered mouse genome occur after the introduced stop codon.

TABLE 12
Nucleotide mutations to generate a humanized mouse locus

| | Human (W402X) | | Mouse (W392X) | | Humanized Mouse | |
|---|---|---|---|---|---|---|
| | Nucleotide | | Nucleotide | | Nucleotide | |
| | (SEQ ID | Encoded | (SEQ ID | Encoded | (SEQ ID | Encoded |
| Feature | NO: 818) | AA | NO: 819) | AA | NO: 820) | AA |
| Protospacer | G | E | A | G | G | G |
| | G | E | G | E | G | E |
| | A | | A | | A | |
| | G | | A | | G | |
| | C | Q | C | Q | C | Q |
| | A | | A | | A | |
| | G | | A | | G | |
| | C | L | C | L | C | L |
| | T | | T | | T | |
| | C | | C | | C | |
| | T | STOP | T | STOP | T | STOP |
| | A | | A | | A | |
| | G | | G | | G | |
| | G | A | G | A | G | A |
| | C | | C | | C | |
| | C | | A | | C | |
| | G | E | G | E | G | E |
| | A | | A | | A | |
| | A | | G | | A | |
| | G | V | G | V | G | V |
| | T | | T | | T | |
| | G | | C | | G | |
| | T | S | T | S | T | S |
| | C | | C | | C | |
| | G | | A | | G | |
| PAM, non- | C | Q | A | K | C | Q |
| critical | A | | A | | A | |
| | G | | G | | G | |
| | G | A | G | A | G | A |
| PAM, | C | | C | | C | |
| critical | C | | T | | C | |

[1434] Upon engineering of this mouse strain, similar experiments will be performed as described in Example 7.4.

### Example 8: Targeting Mutations Responsible for Friedreich Ataxia

[1435] The expansion of the trinucleotide repeat sequence causing Friedreich's Ataxia (FRDA) occurs in a defined genetic locus within the FXN gene, referred to as the FRDA instability region. RNA guided nucleases (RGNs) may be used for excising the instability region in FRDA patient cells. This approach requires 1) an RGN and guide RNA sequence that can be programmed to target the allele in the human genome; and 2) a delivery approach for the RGN and guide sequence. Many nucleases used for genome editing, such as the commonly used Cas9 nuclease from S. pyogenes (SpCas9), are too large to be packaged into adeno-associated viral (AAV) vectors, especially when considering the length of the SpCas9 gene and the guide RNA in addition to other genetic elements required for functional expression cassettes. This makes a viable approach using SpCas9 unlikely.

[1436] RNA guided nucleases of the invention, for example RGNs LPG10165, LPG10166, LPG10167, LPG10168, LPG10207, LPG10169, LPG10171, LPG10186, LPG10190, LPG10191, LPG10194, LPG10195, LPG10196, LPG10197, LPG10198, LPG10200, LPG10203, LPG10204, LPG10205, and LPG10208, are uniquely well suited for the excision of the FRDA instability region. RGNs LPG10165, LPG10166, LPG10167, LPG10168, LPG10207, LPG10169, LPG10171, LPG10186, LPG10190, LPG10191, LPG10194, LPG10195, LPG10196, LPG10197, LPG10198, LPG10200, LPG10203, LPG10204, LPG10205, and LPG10208 have a PAM requirement that is in the vicinity of the FRDA instability region.

[1437] Table 13 shows the location of genomic target sequences suitable for targeting RGNs LPG10165, LPG10166, LPG10167, LPG10168, LPG10207, LPG10169, LPG10171, LPG10186, LPG10190, LPG10191, LPG10194, LPG10195, LPG10196, LPG10197, LPG10198, LPG10200, LPG10203, LPG10204, LPG10205, and LPG10208 to the 5′ and 3′ flanks of the FRDA instability region. Once at the locus, the RGN would excise the FA instability region. Excision of the region can be verified with Illumina sequencing of the locus. Non-limiting exemplary spacers would be complementary to the non-coding DNA strand of the target sequences set forth in Table 13 and non-limiting examples of sgRNA molecules include those comprising such spacers and the crRNA repeat and tracrRNA sequences disclosed herein for the corresponding RGN.

TABLE 13
Genomic target sequences for RGN systems

| | Location relative to FRDA | Genome target sequence |
|---|---|---|
| RGN | instability region | (SEQ ID NO.) |
| LPG10165 | 5′ | 684 |
| LPG10165 | 5′ | 685 |
| LPG10165 | 3′ | 686 |
| LPG10165 | 3′ | 687 |
| LPG10166 | 5′ | 688 |
| LPG10166 | 5′ | 689 |
| LPG10166 | 3′ | 690 |
| LPG10166 | 3′ | 691 |
| LPG10167 | 5′ | 692 |
| LPG10167 | 5′ | 693 |
| LPG10167 | 3′ | 694 |
| LPG10167 | 3′ | 695 |
| LPG10168 | 5′ | 692 |
| LPG10168 | 5′ | 693 |
| LPG10168 | 3′ | 694 |
| LPG10168 | 3′ | 695 |
| LPG10207 | 5′ | 692 |
| LPG10207 | 5′ | 693 |
| LPG10207 | 3′ | 694 |
| LPG10207 | 3′ | 695 |
| LPG10169 | 5′ | 696 |
| LPG10169 | 5′ | 697 |
| LPG10169 | 3′ | 698 |
| LPG10169 | 3′ | 699 |
| LPG10171 | 5′ | 700 |
| LPG10171 | 5′ | 701 |
| LPG10171 | 3′ | 702 |
| LPG10171 | 3′ | 703 |
| LPG10186 | 5′ | 704 |
| LPG10186 | 5′ | 705 |
| LPG10186 | 3′ | 706 |
| LPG10186 | 3′ | 707 |
| LPG10190 | 5′ | 708 |
| LPG10190 | 5′ | 709 |
| LPG10190 | 3′ | 710 |
| LPG10190 | 3′ | 711 |
| LPG10191 | 5′ | 712 |
| LPG10191 | 5′ | 713 |
| LPG10191 | 3′ | 714 |
| LPG10191 | 3′ | 715 |
| LPG10194 | 5′ | 716 |
| LPG10194 | 5′ | 717 |
| LPG10194 | 3′ | 718 |
| LPG10194 | 3′ | 719 |
| LPG10195 | 5′ | 720 |
| LPG10195 | 5′ | 721 |
| LPG10195 | 3′ | 722 |
| LPG10195 | 3′ | 723 |
| LPG10196 | 5′ | 724 |
| LPG10196 | 5′ | 725 |
| LPG10196 | 3′ | 726 |
| LPG10196 | 3′ | 727 |
| LPG10197 | 5′ | 728 |
| LPG10197 | 5′ | 729 |
| LPG10197 | 3′ | 730 |
| LPG10197 | 3′ | 731 |
| LPG10198 | 5′ | 732 |
| LPG10198 | 5′ | 733 |
| LPG10198 | 3′ | 734 |
| LPG10198 | 3′ | 735 |
| LPG10200 | 5′ | 736 |
| LPG10200 | 5′ | 737 |
| LPG10200 | 3′ | 738 |
| LPG10200 | 3′ | 739 |
| LPG10203 | 5′ | 740 |
| LPG10203 | 5′ | 741 |
| LPG10203 | 3′ | 742 |
| LPG10203 | 3′ | 743 |
| LPG10204 | 5′ | 744 |
| LPG10204 | 5′ | 745 |
| LPG10204 | 3′ | 746 |
| LPG10204 | 3′ | 747 |
| LPG10205 | 5′ | 744 |
| LPG10205 | 5′ | 745 |
| LPG10205 | 3′ | 746 |
| LPG10205 | 3′ | 747 |
| LPG10208 | 5′ | 744 |
| LPG10208 | 5′ | 745 |
| LPG10208 | 3′ | 746 |
| LPG10208 | 3′ | 747 |

### Example 9: Targeting Mutations Responsible for Sickle Cell Diseases

[1438] Targeting sequences within the BCL11A enhancer region (SEQ ID NO: 748) may provide a mechanism for increasing fetal hemoglobulin (HbF) to either cure or alleviate the symptoms of sickle cell diseases. For example, genome wide association studies have identified a set of genetic variations at BCL11A that are associated with increased HbF levels. These variations are a collection of SNPs found in non-coding regions of BCL11 A that function as a stage-specific, lineage-restricted enhancer region. Further investigation revealed that this BCL11A enhancer is required in erythroid cells for BCL11A expression (Bauer et al, (2013) Science 343:253-257, incorporated by reference herein). The enhancer region was found within intron 2 of the BCL11 A gene, and three areas of DNaseI hypersensitivity (often indicative of a chromatin state that is associated with regulatory potential) in intron 2 were identified. These three areas were identified as “+62”, “+58” and “+55” in accordance with the distance in kilobases from the transcription start site of BCL11 A. These enhancer regions are roughly 350 (+55); 550 (+58); and 350 (+62) nucleotides in length (Bauer et al., 2013).

### Example 9.1: Identifying Preferred RGN Systems

[1439] Here we describe a potential treatment for beta-hemoglobinopathies using an RGN system that disrupts BCL11 A binding to its binding site within the HBB locus, which is the gene responsible for making beta-globin in adult hemoglobin. This approach uses NHEJ which is more efficient in mammalian cells. In addition, this approach uses a nuclease of sufficiently small size that can be packaged into a single AAV vector for in vivo delivery.

[1440] The GATA1 enhancer motif in the human BCL11 A enhancer region (SEQ ID NO: 748) is an ideal target for disruption using RNA guided nucleases (RGNs) to reduce BCL11 A expression with concurrent re-expression of HbF in adult human erythrocytes (Wu et al. (2019) Nat Med 387:2554). Several PAM sequences compatible with RGNs LPG10165, LPG10166, LPG10167, LPG10168, LPG10207, LPG10169, LPG10171, LPG10186, LPG10190, LPG10191, LPG10194, LPG10195, LPG10196, LPG10197, LPG10198, LPG10200, LPG10203, LPG10204, LPG10205, and LPG10208 are readily apparent at the genetic locus surrounding this GATA1 site.

[1441] An expression cassette encoding a human codon optimized RGNs LPG10165, LPG10166, LPG10167, LPG10168, LPG10207, LPG10169, LPG10171, LPG10186, LPG10190, LPG10191, LPG10194, LPG10195, LPG10196, LPG10197, LPG10198, LPG10200, LPG10203, LPG10204, LPG10205, or LPG10208 (set forth as SEQ ID NOs: 750-769) is produced, similar to those described in Example 4. Expression cassettes which express guide RNAs for RGNs LPG10165, LPG10166, LPG10167, LPG10168, LPG10207, LPG10169, LPG10171, LPG10186, LPG10190, LPG10191, LPG10194, LPG10195, LPG10196, LPG10197, LPG10198, LPG10200, LPG10203, LPG10204, LPG10205, and LPG10208 are also produced. These guide RNAs comprise: 1) a protospacer sequence that is complementary to either the non-coding or coding DNA strand within the BCL11A enhancer locus (the target sequence) and 2) an RNA sequence required for association of the guide RNA with the RGN. Because several potential PAM sequences for targeting by RGNs LPG10165, LPG10166, LPG10167, LPG10168, LPG10207, LPG10169, LPG10171, LPG10186, LPG10190, LPG10191, LPG10194, LPG10195, LPG10196, LPG10197, LPG10198, LPG10200, LPG10203, LPG10204, LPG10205, and LPG10208 surround the BCL11A GATA1 enhancer motif, several potential guide RNA constructs are produced to determine the best protospacer sequence that produces robust cleavage and NHEJ mediated disruption of the BCL11A GATA1 enhancer sequence. Non-limiting exemplary spacers would be complementary to the non-coding DNA strand of the target sequences set forth in Table 14 and non-limiting examples of sgRNA molecules include those comprising such spacers and the crRNA repeat and tracrRNA sequences disclosed herein for the corresponding RGN. sGRNAs that target the target genomic sequences in Table 14 are evaluated to direct the RGN to this locus.

TABLE 14
Target Sequences for BCL11A GATA1 enhancer locus

| | Target genomic sequence |
|---|---|
| RGN | (SEQ ID NO.) |
| LPG10165 | 770 |
| LPG10165 | 771 |
| LPG10165 | 772 |
| LPG10166 | 773 |
| LPG10166 | 774 |
| LPG10166 | 775 |
| LPG10167 | 776 |
| LPG10167 | 777 |
| LPG10167 | 778 |
| LPG10168 | 776 |
| LPG10168 | 777 |
| LPG10168 | 778 |
| LPG10207 | 776 |
| LPG10207 | 777 |
| LPG10207 | 778 |
| LPG10169 | 779 |
| LPG10169 | 780 |
| LPG10169 | 781 |
| LPG10171 | 782 |
| LPG10171 | 783 |
| LPG10171 | 784 |
| LPG10186 | 785 |
| LPG10186 | 786 |
| LPG10186 | 787 |
| LPG10190 | 788 |
| LPG10190 | 789 |
| LPG10190 | 790 |
| LPG10191 | 791 |
| LPG10191 | 792 |
| LPG10191 | 793 |
| LPG10194 | 794 |
| LPG10194 | 795 |
| LPG10194 | 796 |
| LPG10195 | 797 |
| LPG10195 | 798 |
| LPG10195 | 799 |
| LPG10196 | 800 |
| LPG10196 | 801 |
| LPG10196 | 802 |
| LPG10197 | 803 |
| LPG10197 | 804 |
| LPG10197 | 805 |
| LPG10198 | 806 |
| LPG10198 | 807 |
| LPG10198 | 808 |
| LPG10200 | 809 |
| LPG10200 | 810 |
| LPG10200 | 811 |
| LPG10203 | 812 |
| LPG10203 | 813 |
| LPG10203 | 814 |
| LPG10204 | 815 |
| LPG10204 | 816 |
| LPG10204 | 817 |
| LPG10205 | 815 |
| LPG10205 | 816 |
| LPG10205 | 817 |
| LPG10208 | 815 |
| LPG10208 | 816 |
| LPG10208 | 817 |

[1442] To evaluate the efficiency with which RGNs LPG10165, LPG10166, LPG10167, LPG10168, LPG10207, LPG10169, LPG10171, LPG10186, LPG10190, LPG10191, LPG10194, LPG10195, LPG10196, LPG10197, LPG10198, LPG10200, LPG10203, LPG10204, LPG10205, and LPG10208 generate insertions or deletions that disrupt the BCL11A enhancer region, human cell lines such as human embryonic kidney cells (HEK cells) are used. A DNA vector comprising an RGN expression cassette (for example, as described in Example 4) is produced. A separate vector comprising an expression cassette comprising a coding sequence for a guide RNA sequence of Table 16 is also produced. Such an expression cassette may further comprise a human RNA polymerase III U6 promoter (SEQ ID NO: 173), as described in Example 4. Alternatively, a single vector comprising expression cassettes of both the RGN and guide RNA may be used. The vector is introduced into HEK cells using standard techniques such as those described in Example 4, and the cells are cultured for 1-3 days. Following this culture period, genomic DNA is isolated and the frequency of insertions or deletions is determined by using T7 Endonuclease I digestion and/or direct DNA sequencing, as described in Example 4.

[1443] A region of DNA encompassing the target BCL11 A region is amplified by PCR with primers containing Illumina Nextera XT overhang sequences. These PCR amplicons are either examined for NHEJ formation using T7 Endonuclease I digestion, or undergo library preparation following the Illumina 16S Metagenomic Sequencing Library protocol or a similar Next Generation Sequencing (NGS) library preparation. Following deep sequencing, the reads generated are analyzed by CRISPResso to calculate rates of editing. Output alignments are hand-curated to confirm insertion and deletion sites. This analysis identifies the preferred RGN and the corresponding preferred guide RNA (sgRNA). The analysis may result in any of RGNs LPG10165, LPG10166, LPG10167, LPG10168, LPG10207, LPG10169, LPG10171, LPG10186, LPG10190, LPG10191, LPG10194, LPG10195, LPG10196, LPG10197, LPG10198, LPG10200, LPG10203, LPG10204, LPG10205, and LPG10208 being equally preferred. Additionally, the analysis may determine there is more than one preferred guide RNA, or that all target genomic sequences in Table 14 are equally preferred.

### Example 9.2: Assay for Expression of Fetal Hemoglobin

[1444] In this example, RGNs LPG10165, LPG10166, LPG10167, LPG10168, LPG10207, LPG10169, LPG10171, LPG10186, LPG10190, LPG10191, LPG10194, LPG10195, LPG10196, LPG10197, LPG10198, LPG10200, LPG10203, LPG10204, LPG10205, or LPG10208-generated insertions or deletions disrupting the BCL11 A enhancer region are assayed for expression of fetal hemoglobin. Healthy human donor CD34⁺ hematopoietic stem cells (HSCs) are used. These HSCs are cultured and vector(s) comprising expression cassettes comprising the coding regions of the preferred RGN and the preferred sgRNA are introduced using methods similar to those described in Example 8.1. Following electroporation, these cells are differentiated in vitro into erythrocytes using established protocols (for example, Giarratana et al. (2004) Nat Biotechnology 23:69-74, herein incorporated by reference). The expression of HbF is then measured using western blotting with an anti-human HbF antibody, or quantified via High Performance Liquid Chromatography (HPLC). It is expected that successful disruption of the BCL11 A enhancer locus will lead to an increase in HbF production when compared to HSCs electroporated with only the RGN but no guide.

### Example 9.3: Assay for Decreased Sickle Cell Formation

[1445] In this example, RGNs LPG10165, LPG10166, LPG10167, LPG10168, LPG10207, LPG10169, LPG10171, LPG10186, LPG10190, LPG10191, LPG10194, LPG10195, LPG10196, LPG10197, LPG10198, LPG10200, LPG10203, LPG10204, LPG10205, or LPG10208-generated insertions or deletions disrupting the BCL11 A enhancer region are assayed for decreased sickle-cell formation. Donor CD34⁺ hematopoietic stem cells (HSCs) from patients afflicted with sickle cell disease are used. These HSCs are cultured and vector(s) comprising expression cassettes comprising the coding regions of preferred RGN and the preferred sgRNA are introduced using methods similar to those described in Example 8.1. Following electroporation, these cells are differentiated in vitro into erythrocytes using established protocols (Giarratana et al. (2004) Nat Biotechnology 23:69-74). The expression of HbF is then measured using western blotting with an anti-human HbF antibody, or quantified via High Performance Liquid Chromatography (HPLC). It is expected that successful disruption of the BCL11 A enhancer locus will lead to an increase in HbF production when compared to HSCs electroporated with only the RGN but no guide.

[1446] Sickle cell formation is induced in these differentiated erythrocytes by the addition of metabisulfite. The numbers of sickled vs normal erythrocytes are counted using a microscope. It is expected that the numbers of sickled cells are less in cells treated with RGNs LPG10165, LPG10166, LPG10167, LPG10168, LPG10207, LPG10169, LPG10171, LPG10186, LPG10190, LPG10191, LPG10194, LPG10195, LPG10196, LPG10197, LPG10198, LPG10200, LPG10203, LPG10204, LPG10205, or LPG10208 plus sgRNAs than with cells untreated, or treated with RGNs alone.

### Example 9.4: Disease Treatment Validation in a Murine Model

[1447] To evaluate the efficacy of using RGNs LPG10165, LPG10166, LPG10167, LPG10168, LPG10207, LPG10169, LPG10171, LPG10186, LPG10190, LPG10191, LPG10194, LPG10195, LPG10196, LPG10197, LPG10198, LPG10200, LPG10203, LPG10204, LPG10205, or LPG10208 for disruption of the BCL11 A locus, suitable humanized mouse models of sickle cell anemia are used. Expression cassettes encoding for the preferred RGN and for the preferred sgRNA are packaged into AAV vectors or adenovirus vectors. In particular, adenovirus type Ad5/35 is effective at targeting HSCs. A suitable mouse model containing a humanized HBB locus with sickle cell alleles is chosen, such as B6; FVB-Tg(LCR-HBA2,LCR-HBB*E26K)53Hhb/J or B6.Cg-Hbatm1Paz Hbbtm1Tow Tg(HBA-HBBs)41Paz/HhbJ. These mice are treated with granulocyte colony-stimulating factor alone or in combination with plerixafor to mobilize HSCs into circulation. AAVs or adenoviruses carrying the RGN and guide plasmid are then injected intravenously, and the mice are allowed to recover for a week. Blood obtained from these mice is tested in an in vitro sickling assay using metabisulfite, and the mice are followed longitudinally to monitor mortality rates and hematopoietic function. It is expected that treatment with AAVs or adenoviruses carrying an RGN and guide RNA will reduce sickling, mortality, and improve hematopoietic function when compared to mice treated with viruses lacking both expression cassettes, or with viruses carrying the RGN expression cassette alone.

### Example 10: LPG10167 and LPG10169 are Able to Robustly Edit Multiple Target Loci in Mammalian Cells when Delivered as Plasmids

[1448] Guides targeting several genes were designed for robustness testing in HEK293T cells by plasmid delivery. These guides were tested under optimal editing conditions for HEK293T cells in a 96-well plate which involved seeding 10,000 cells on day 1, lipofection using Lipofectamine 3000 on day 2, and genomic DNA extraction on day 4. Lipofections were performed by mixing 160 ng of LPG10167- or LPG10169-encoding plasmid and 40 ng of guide RNA-encoding plasmid, and 0.4 μl of p3000 in Opti-MEM. Then, 0.3 μl of Lipofectamine 3000 diluted in Opti-MEM was added to the plasmid mixture and incubated for 15 mins before adding to cells. Regions around the editing site for each guide were amplified from the extracted genomic DNA and sequenced. The editing efficiency of each nuclease with each guide RNA is reported as percent editing (percent of INDELS at the target site). Out of 35 guide RNAs tested, LPG10167 exhibited editing greater than 20% with 20% of the guide RNAs (7/35 guide RNAs) and had editing over 10% with 37% of guide RNAs tested (13/35 guide RNAs). Out of 35 guide RNAs tested, LPG10169 exhibited editing greater than 20% with 74% of the guide RNAs (29/35 guide RNAs) and had editing over 10% with 83% of guide RNAs tested (26/35 guide RNAs).

TABLE 15
Editing of 3 genes by LPG10167 by
plasmid delivery in HEK293T cells

| | | sgRNA Target | | |
|---|---|---|---|---|
| | sgRNA | sequence | Percent | |
| sgRNA | backbone seq | SEQ ID NO | Editing | Gene |
| SGN005914 | SEQ ID NO: 65 | 831 | 15.6902031 | Gene A |
| SGN005915 | SEQ ID NO: 65 | 832 | 2.74297473 | Gene A |
| SGN005915 | SEQ ID NO: 65 | 832 | 29.9488671 | Gene A |
| SGN005917 | SEQ ID NO: 65 | 833 | 1.35942023 | Gene A |
| SGN005917 | SEQ ID NO: 65 | 833 | 1.30778333 | Gene A |
| SGN005810 | LPG10167_altv1 | 834 | 1.84378551 | Gene B |
| SGN005810 | LPG10167_altv1 | 834 | 2.03935874 | Gene B |
| SGN005814 | LPG10167_altv1 | 835 | 21.4255711 | Gene B |
| SGN005809 | LPG10167_altv1 | 836 | 31.326861 | Gene B |
| SGN005809 | LPG10167_altv1 | 836 | 30.0722332 | Gene B |
| SGN005811 | LPG10167_altv1 | 837 | 25.7482184 | Gene B |
| SGN005811 | LPG10167_altv1 | 837 | 35.987452 | Gene B |
| SGN005812 | LPG10167_altv1 | 838 | 12.1722701 | Gene B |
| SGN005812 | LPG10167_altv1 | 838 | 18.6820282 | Gene B |
| SGN005813 | LPG10167_altv1 | 839 | 2.57028656 | Gene B |
| SGN005815 | LPG10167_altv1 | 840 | 28.4798485 | Gene B |
| SGN005920 | SEQ ID NO: 65 | 841 | 30.9580842 | Gene A |
| SGN005920 | SEQ ID NO: 65 | 841 | 27.8602401 | Gene A |
| SGN005822 | LPG10167_altv1 | 842 | 0.24640757 | Gene C |
| SGN005822 | LPG10167_altv1 | 842 | 0.52382121 | Gene C |
| SGN003670 | LPG10167_altv1 | 843 | 1.95824267 | Gene C |
| SGN003670 | LPG10167_altv1 | 843 | 1.60709531 | Gene C |
| SGN005817 | LPG10167_altv1 | 844 | 5.0984934 | Gene C |
| SGN005817 | LPG10167_altv1 | 844 | 4.08188669 | Gene C |
| SGN005819 | LPG10167_altv1 | 845 | 0 | Gene C |
| SGN005819 | LPG10167_altv1 | 845 | 0 | Gene C |
| SGN005820 | LPG10167_altv1 | 846 | 0.52905944 | Gene C |
| SGN005820 | LPG10167_altv1 | 846 | 0.1935342 | Gene C |
| SGN005821 | LPG10167_altv1 | 847 | 3.21900097 | Gene C |
| SGN005821 | LPG10167_altv1 | 847 | 2.33903006 | Gene C |
| SGN005818 | LPG10167_altv1 | 848 | 0.59027286 | Gene C |
| SGN005818 | LPG10167_altv1 | 848 | 0.59988664 | Gene C |

TABLE 16
Editing of 3 additional genes by LPG10167
by plasmid delivery in HEK293T cells

| sgRNA | Percent Editing | Gene |
|---|---|---|
| SGN005954 | 4.80391545 | Gene D |
| SGN005954 | 5.0663098 | Gene D |
| SGN005950 | 0.66249071 | Gene D |
| SGN005950 | 0.9527471 | Gene D |
| SGN005952 | 6.67256243 | Gene D |
| SGN005952 | 5.76765811 | Gene D |
| SGN005951 | 5.57846706 | Gene D |
| SGN005951 | 4.87628096 | Gene D |
| SGN005953 | 5.70167496 | Gene D |
| SGN005953 | 3.2888097 | Gene D |
| SGN005949 | 9.91554797 | Gene D |
| SGN005949 | 11.5282082 | Gene D |
| SGN005955 | 8.8758457 | Gene D |
| SGN005955 | 5.88584917 | Gene D |
| SGN005986 | 18.6878186 | Gene E |
| SGN005986 | 16.1567291 | Gene E |
| SGN005987 | 17.5418784 | Gene E |
| SGN005987 | 13.8706581 | Gene E |
| SGN005984 | 23.0083559 | Gene E |
| SGN005984 | 22.3948067 | Gene E |
| SGN005985 | 29.6956919 | Gene E |
| SGN005985 | 26.2228692 | Gene E |
| SGN006018 | 6.83062904 | Gene F |
| SGN006018 | 6.38400407 | Gene F |
| SGN006019 | 0.19555778 | Gene F |
| SGN006019 | 0.55690726 | Gene F |
| SGN006021 | 8.66222435 | Gene F |
| SGN006021 | 5.61647981 | Gene F |
| SGN006020 | 0.29773582 | Gene F |
| SGN006020 | 0.17068595 | Gene F |
| SGN006017 | 1.63186849 | Gene F |
| SGN006017 | 1.06170828 | Gene F |
| SGN006016 | 0.96019362 | Gene F |
| SGN006016 | 1.01881817 | Gene F |

All sgRNAs in Table 16 had a wild type sgRNA backbone (i.e., used the crRNA and tracrRNA as set forth in Table 1).

TABLE 17
Editing of 3 genes by LPG10169 by
plasmid delivery in HEK293T cells

| | sgRNA target | | |
|---|---|---|---|
| | sequence | Percent | |
| sgRNA | SEQ ID NO | editing | Gene |
| SGN005924 | 849 | 14.9602258 | Gene A |
| SGN005924 | 849 | 14.8238567 | Gene A |
| SGN005925 | 850 | 17.3862072 | Gene A |
| SGN005925 | 850 | 20.4117764 | Gene A |
| SGN005923 | 851 | 40.4018298 | Gene A |
| SGN005923 | 851 | 38.7923458 | Gene A |
| SGN005926 | 852 | 33.6043014 | Gene A |
| SGN005843 | 853 | 47.1458927 | Gene B |
| SGN005843 | 853 | 50.2070439 | Gene B |
| SGN005841 | 854 | 58.8185724 | Gene B |
| SGN005841 | 854 | 49.2075575 | Gene B |
| SGN005783 | 855 | 47.6077834 | Gene B |
| SGN005783 | 855 | 37.614559 | Gene B |
| SGN005838 | 856 | 22.8976127 | Gene B |
| SGN005838 | 856 | 25.9730383 | Gene B |
| SGN005781 | 857 | 39.6777187 | Gene B |
| SGN005781 | 857 | 39.3404799 | Gene B |
| SGN005775 | 858 | 25.2095538 | Gene B |
| SGN005775 | 858 | 30.9052822 | Gene B |
| SGN005599 | 859 | 57.7777778 | Gene B |
| SGN005599 | 859 | 48.7960344 | Gene B |
| SGN006003 | 860 | 38.0171972 | Gene C |
| SGN006003 | 860 | 31.7637247 | Gene C |
| SGN006001 | 861 | 52.8669926 | Gene C |
| SGN006001 | 861 | 51.8285216 | Gene C |
| SGN006004 | 862 | 34.8762091 | Gene C |
| SGN006004 | 862 | 34.6849171 | Gene C |
| SGN005998 | 863 | 1.43178644 | Gene C |
| SGN005998 | 863 | 1.23180538 | Gene C |
| SGN005999 | 864 | 2.17040806 | Gene C |
| SGN005999 | 864 | 2.94154505 | Gene C |
| SGN006002 | 865 | 31.1098001 | Gene C |
| SGN006002 | 865 | 29.7411603 | Gene C |
| SGN006000 | 866 | 22.8669102 | Gene C |
| SGN006000 | 866 | 21.4160599 | Gene C |
| SGN005773 | 867 | 44.4561818 | Gene D |
| SGN005773 | 867 | 33.2241976 | Gene D |
| SGN005769 | 868 | 15.4975381 | Gene D |
| SGN005769 | 868 | 15.3210356 | Gene D |
| SGN005771 | 869 | 26.3042673 | Gene D |
| SGN005771 | 869 | 21.7449558 | Gene D |
| SGN005768 | 870 | 41.3729237 | Gene D |
| SGN005768 | 870 | 41.3457484 | Gene D |
| SGN005774 | 871 | 34.9218687 | Gene D |
| SGN005774 | 871 | 37.6106616 | Gene D |
| SGN005772 | 872 | 54.3926545 | Gene D |
| SGN005772 | 872 | 29.6654487 | Gene D |
| SGN005770 | 873 | 45.9437597 | Gene D |
| SGN005770 | 873 | 39.5701028 | Gene D |

All sgRNAs in Table 17 used the LPG10169_altv1 sgRNA backbone sequence set forth as SEQ ID NO: 1042.

TABLE 18
Editing of 2 additional genes by LPG10169
by plasmid delivery in HEK293T cells

| sgRNA | Percent Editing | Gene |
|---|---|---|
| SGN005957 | 30.358198 | Gene E |
| SGN005957 | 29.0760167 | Gene E |
| SGN005960 | 26.7547061 | Gene E |
| SGN005960 | 29.0880437 | Gene E |
| SGN005956 | 1.21155968 | Gene E |
| SGN005956 | 1.3489439 | Gene E |
| SGN005962 | 32.2322546 | Gene E |
| SGN005962 | 26.0777019 | Gene E |
| SGN005959 | 5.05967949 | Gene E |
| SGN005959 | 6.03141626 | Gene E |
| SGN005958 | 31.9462067 | Gene E |
| SGN005958 | 28.1011266 | Gene E |
| SGN005961 | 3.63621808 | Gene E |
| SGN005961 | 3.39061936 | Gene E |
| SGN006022 | 0 | Gene F |
| SGN006022 | 0 | Gene F |
| SGN006023 | 36.3461784 | Gene F |
| SGN006023 | 38.1796424 | Gene F |
| SGN006024 | 65.3302941 | Gene F |
| SGN006024 | 66.0638266 | Gene F |

All sgRNAs in Table 18 used the LPG10169_altv1 sgRNA backbone sequence set forth as SEQ ID NO: 1042.

### Example 11: LPG10169 is Able to Edit Multiple Target Loci in Mammalian Cells when Delivered as a Ribonucleoprotein

[1449] To evaluate LPG10169 editing reproducibility, LPG10169 was delivered as ribonucleoproteins (RNP: RNA-guided nuclease complexed with single guide RNAs) in T cells through nucleofection. For delivery of LPG10169 as ribonucleoproteins in T cells, nucleofection was utilized, which is an electroporation-based method that allows for the transfer of DNA, RNA, and/or protein into the cell nucleus. Isolated peripheral blood mononuclear cells (PBMC) were thawed, activated with CD3/CD28 beads, and incubated at 37° C. with 5% CO₂. After 3 days, the beads were removed from the cells, which resulted in an enriched population of activated T cells. The activated T cells were then concentrated via centrifugation and resuspended in nucleofection buffer (P3 Solution Lonza) so that 1×10⁶ cells could be used for each reaction. The RNP (60 pmol RGN and 120 pmol guide RNA) were incubated at room temperature for at least 10 minutes prior to addition of the PBMC. The T cells+LPG10169+sgRNA reactions were nucleofected according to the manufacturer's instructions (Lonza). After nucleofection, the cells rested for 10 minutes, followed by incubation in media for 1-4 days. To determine the editing efficiency, the nucleofected T cells were incubated with an appropriate fluorophore-conjugated antibody followed by flow cytometry. Editing efficiency is reported as percent knockout of the gene of interest. An unedited control was included to ensure staining efficiency was complete. Here, multiple sgRNA targeting different genes were utilized to show the reproducibility of LPG10169 editing with all guides returning a coefficient of variation (CV) value of less than 50%.

TABLE 19
Editing of 2 genes by LPG10169 by RNP delivery in T cells

| | | sgRNA target | | |
|---|---|---|---|---|
| | sgRNA | sequence | Percent | |
| sgRNA | backbone seq | SEQ ID NO | Editing | Gene |
| SGN005782 | APG01604_altv1 | 992 | 0 | Gene A |
| SGN005782 | APG01604_altv1 | 992 | 0 | Gene A |
| SGN005782 | APG01604_altv1 | 992 | 0 | Gene A |
| SGN005782 | APG01604_altv1 | 992 | 0 | Gene A |
| SGN005782 | APG01604_altv1 | 992 | 0 | Gene A |
| SGN005782 | APG01604_altv1 | 992 | 0 | Gene A |
| SGN005777 | APG01604_altv1 | 993 | 58.7235151 | Gene A |
| SGN005777 | APG01604_altv1 | 993 | 59.8450226 | Gene A |
| SGN005777 | APG01604_altv1 | 993 | 58.3732381 | Gene A |
| SGN005777 | APG01604_altv1 | 993 | 57.4838508 | Gene A |
| SGN005777 | APG01604_altv1 | 993 | 57.547783 | Gene A |
| SGN005777 | APG01604_altv1 | 993 | 55.9661206 | Gene A |
| SGN005783 | LPG10169_altv1 | 994 | 3.94383289 | Gene A |
| SGN005783 | LPG10169_altv1 | 994 | 5.81863884 | Gene A |
| SGN005783 | LPG10169_altv1 | 994 | 5.55818727 | Gene A |
| SGN005783 | LPG10169_altv1 | 994 | 3.841975 | Gene A |
| SGN005783 | LPG10169_altv1 | 994 | 2.55979693 | Gene A |
| SGN005783 | LPG10169_altv1 | 994 | 2.34298474 | Gene A |
| SGN005781 | LPG10169_altv1 | 995 | 0.48979667 | Gene A |
| SGN005781 | LPG10169_altv1 | 995 | 0.34600111 | Gene A |
| SGN005781 | LPG10169_altv1 | 995 | 0.12481467 | Gene A |
| SGN005781 | LPG10169_altv1 | 995 | 0.04235935 | Gene A |
| SGN005781 | LPG10169_altv1 | 995 | 0.13790916 | Gene A |
| SGN005781 | LPG10169_altv1 | 995 | 0.07981781 | Gene A |
| SGN005776 | APG01604_altv1 | 996 | 53.2908207 | Gene A |
| SGN005776 | APG01604_altv1 | 996 | 53.7604188 | Gene A |
| SGN005776 | APG01604_altv1 | 996 | 55.0354163 | Gene A |
| SGN005776 | APG01604_altv1 | 996 | 52.3445185 | Gene A |
| SGN005776 | APG01604_altv1 | 996 | 50.9454218 | Gene A |
| SGN005776 | APG01604_altv1 | 996 | 53.4400559 | Gene A |
| SGN004748 | APG01604_altv1 | 997 | 17.2240528 | Gene A |
| SGN004748 | APG01604_altv1 | 997 | 14.1702725 | Gene A |
| SGN004748 | APG01604_altv1 | 997 | 12.7553689 | Gene A |
| SGN004748 | APG01604_altv1 | 997 | 13.3994387 | Gene A |
| SGN004748 | APG01604_altv1 | 997 | 11.5806321 | Gene A |
| SGN005780 | APG01604_altv1 | 998 | 3.67326235 | Gene A |
| SGN005780 | APG01604_altv1 | 998 | 3.73146582 | Gene A |
| SGN005780 | APG01604_altv1 | 998 | 3.63697053 | Gene A |
| SGN005780 | APG01604_altv1 | 998 | 4.24748929 | Gene A |
| SGN005780 | APG01604_altv1 | 998 | 3.57239421 | Gene A |
| SGN005779 | APG01604_altv1 | 999 | 68.4804172 | Gene A |
| SGN005779 | APG01604_altv1 | 999 | 73.8171045 | Gene A |
| SGN005779 | APG01604_altv1 | 999 | 54.615976 | Gene A |
| SGN005779 | APG01604_altv1 | 999 | 48.6238283 | Gene A |
| SGN005779 | APG01604_altv1 | 999 | 60.9002569 | Gene A |
| SGN005779 | APG01604_altv1 | 999 | 57.1299903 | Gene A |
| SGN005773 | LPG10169_altv1 | 1000 | 84.7583661 | Gene B |
| SGN005773 | LPG10169_altv1 | 1000 | 92.3016714 | Gene B |
| SGN005773 | LPG10169_altv1 | 1000 | 75.8830753 | Gene B |
| SGN005773 | LPG10169_altv1 | 1000 | 81.6155928 | Gene B |
| SGN005773 | LPG10169_altv1 | 1000 | 79.6614921 | Gene B |
| SGN005773 | LPG10169_altv1 | 1000 | 85.0834861 | Gene B |
| SGN005769 | LPG10169_altv1 | 1001 | 0.19490896 | Gene B |
| SGN005769 | LPG10169_altv1 | 1001 | 0 | Gene B |
| SGN005769 | LPG10169_altv1 | 1001 | 0 | Gene B |
| SGN005769 | LPG10169_altv1 | 1001 | 0.18070379 | Gene B |
| SGN005769 | LPG10169_altv1 | 1001 | 0.11359151 | Gene B |
| SGN005769 | LPG10169_altv1 | 1001 | 0.13972122 | Gene B |
| SGN005771 | LPG10169_altv1 | 1002 | 0.44167316 | Gene B |
| SGN005771 | LPG10169_altv1 | 1002 | 0.47722078 | Gene B |
| SGN005771 | LPG10169_altv1 | 1002 | 0.07050686 | Gene B |
| SGN005771 | LPG10169_altv1 | 1002 | 0.73890895 | Gene B |
| SGN005771 | LPG10169_altv1 | 1002 | 0.65421247 | Gene B |
| SGN005771 | LPG10169_altv1 | 1002 | 0.52317665 | Gene B |
| SGN005765 | APG01604_altv1 | 1003 | 4.65913098 | Gene B |
| SGN005765 | APG01604_altv1 | 1003 | 5.27222029 | Gene B |
| SGN005765 | APG01604_altv1 | 1003 | 2.54049051 | Gene B |
| SGN005765 | APG01604_altv1 | 1003 | 2.84028893 | Gene B |
| SGN005765 | APG01604_altv1 | 1003 | 5.7169896 | Gene B |
| SGN005766 | APG01604_altv1 | 1004 | 0.14281903 | Gene B |
| SGN005766 | APG01604_altv1 | 1004 | 0.06928507 | Gene B |
| SGN005766 | APG01604_altv1 | 1004 | 0 | Gene B |
| SGN005766 | APG01604_altv1 | 1004 | 0 | Gene B |
| SGN005766 | APG01604_altv1 | 1004 | 0 | Gene B |
| SGN005766 | APG01604_altv1 | 1004 | 0 | Gene B |
| SGN005768 | LPG10169_altv1 | 1005 | 1.73997495 | Gene B |
| SGN005768 | LPG10169_altv1 | 1005 | 3.71015723 | Gene B |
| SGN005768 | LPG10169_altv1 | 1005 | 2.02763059 | Gene B |
| SGN005768 | LPG10169_altv1 | 1005 | 2.28036298 | Gene B |
| SGN005768 | LPG10169_altv1 | 1005 | 3.28816821 | Gene B |
| SGN005768 | LPG10169_altv1 | 1005 | 1.94649221 | Gene B |
| SGN005774 | LPG10169_altv1 | 1006 | 39.4160209 | Gene B |
| SGN005774 | LPG10169_altv1 | 1006 | 37.4843685 | Gene B |
| SGN005774 | LPG10169_altv1 | 1006 | 24.3723105 | Gene B |
| SGN005774 | LPG10169_altv1 | 1006 | 27.6958085 | Gene B |
| SGN005774 | LPG10169_altv1 | 1006 | 21.5484699 | Gene B |
| SGN005774 | LPG10169_altv1 | 1006 | 26.7920212 | Gene B |
| SGN005772 | LPG10169_altv1 | 1007 | 46.2335416 | Gene B |
| SGN005772 | LPG10169_altv1 | 1007 | 37.9421513 | Gene B |
| SGN005772 | LPG10169_altv1 | 1007 | 18.7995158 | Gene B |
| SGN005772 | LPG10169_altv1 | 1007 | 31.5397509 | Gene B |
| SGN005772 | LPG10169_altv1 | 1007 | 35.4858142 | Gene B |
| SGN005772 | LPG10169_altv1 | 1007 | 32.8500034 | Gene B |
| SGN005767 | APG01604_altv1 | 1008 | 0 | Gene B |
| SGN005767 | APG01604_altv1 | 1008 | 0 | Gene B |
| SGN005767 | APG01604_altv1 | 1008 | 0 | Gene B |
| SGN005767 | APG01604_altv1 | 1008 | 0.16998575 | Gene B |
| SGN005767 | APG01604_altv1 | 1008 | 0 | Gene B |
| SGN005767 | APG01604_altv1 | 1008 | 0.04165963 | Gene B |
| SGN005770 | LPG10169_altv1 | 1009 | 0 | Gene B |
| SGN005770 | LPG10169_altv1 | 1009 | 0.64652568 | Gene B |
| SGN005770 | LPG10169_altv1 | 1009 | 0.86978327 | Gene B |
| SGN005770 | LPG10169_altv1 | 1009 | 0.73410084 | Gene B |
| SGN005770 | LPG10169_altv1 | 1009 | 0.97032105 | Gene B |
| SGN005770 | LPG10169_altv1 | 1009 | 0.70931921 | Gene B |

The sgRNA backbone sequences APG01604_altv1 and LPG10169_altv1 are set forth as SEQ ID NOs: 1041 and 1042, respectively.

### Example 12: LPG10196 is Able to Edit Multiple Target Loci in Mammalian Cells when Delivered as Plasmids or an mRNA

[1450] Guide RNAs targeting several genes were designed for robustness testing in HEK293T cells by plasmid delivery. These guides were tested under optimal editing conditions for HEK293T cells in a 96-well plate which involved seeding 10,000 cells on day 1, lipofection using Lipofectamine 3000 on day 2, and genomic DNA extraction on day 4. Lipofections were performed by mixing 160 ng of LPG10196-encoding plasmid and 40 ng of guide RNA-encoding plasmid, and 0.4 μl of p3000 in Opti-MEM. Then, 0.3 μl of Lipofectamine 3000 diluted in Opti-MEM was added to the plasmid mixture and incubated for 15 mins before adding to cells. Regions around the editing site for each guide are amplified from the extracted genomic DNA and sequenced by NGS as described in Example 4. The editing efficiency of each nuclease with each guide RNA is reported as percent editing (percent of RINDELS at the target site). Out of 40 guide RNAs tested, no guide RNAs exhibited editing greater than 1000.

TABLE 20
Editing of 3 genes by LPG10196 by
plasmid delivery in HEK293T cells

| | sgRNA target | | |
|---|---|---|---|
| | sequence | Percent | |
| sgRNA | SEQ ID NO | Editing | Gene |
| SGN008751 | 1010 | 2.31119542 | Gene A |
| SGN008751 | 1010 | 2.07930219 | Gene A |
| SGN008752 | 1011 | 1.53116594 | Gene A |
| SGN008752 | 1011 | 1.02926413 | Gene A |
| SGN008752 | 1011 | 0.26787925 | Gene A |
| SGN008752 | 1011 | 0.24384033 | Gene A |
| SGN008753 | 1012 | 0 | Gene A |
| SGN008753 | 1012 | 0 | Gene A |
| SGN008754 | 1013 | 0.34027866 | Gene B |
| SGN008754 | 1013 | 0.16095991 | Gene B |
| SGN008754 | 1013 | 0 | Gene B |
| SGN008755 | 1014 | 2.10475191 | Gene B |
| SGN008755 | 1014 | 1.18748882 | Gene B |
| SGN008756 | 1015 | 1.00449529 | Gene B |
| SGN008756 | 1015 | 0.61317269 | Gene B |
| SGN008757 | 1016 | 1.72424183 | Gene B |
| SGN008757 | 1016 | 1.56266594 | Gene B |
| SGN008758 | 1017 | 0.47270321 | Gene B |
| SGN008758 | 1017 | 0.21425377 | Gene B |
| SGN008759 | 1018 | 0.79871802 | Gene B |
| SGN008759 | 1018 | 0.71299172 | Gene B |
| SGN008759 | 1018 | 0.37832124 | Gene B |
| SGN008759 | 1018 | 0.36686486 | Gene B |
| SGN008760 | 1019 | 0.15655804 | Gene B |
| SGN008760 | 1019 | 0 | Gene B |
| SGN008761 | 1020 | 1.27660997 | Gene B |
| SGN008761 | 1020 | 0.60405209 | Gene B |
| SGN008762 | 1021 | 4.06040657 | Gene B |
| SGN008763 | 1022 | 0 | Gene B |
| SGN008763 | 1022 | 0 | Gene B |
| SGN008771 | 1023 | 7.67238324 | Gene B |
| SGN008771 | 1023 | 6.90172821 | Gene B |
| SGN008772 | 1024 | 0.05511203 | Gene B |
| SGN008772 | 1024 | 0.03041783 | Gene B |
| SGN008773 | 1025 | 1.59124182 | Gene B |
| SGN008773 | 1025 | 1.47677043 | Gene B |
| SGN008774 | 1026 | 0.04540704 | Gene B |
| SGN008774 | 1026 | 0.04108932 | Gene B |
| SGN008775 | 1027 | 0.0880911 | Gene B |
| SGN008775 | 1027 | 0.04038421 | Gene B |
| SGN008776 | 1028 | 0 | Gene B |
| SGN008776 | 1028 | 0 | Gene B |
| SGN008776 | 1028 | 0 | Gene B |
| SGN008777 | 1029 | 0.03742341 | Gene B |
| SGN008777 | 1029 | 0 | Gene B |
| SGN008777 | 1029 | 0 | Gene B |
| SGN008778 | 1030 | 0.29135427 | Gene A |
| SGN008778 | 1030 | 0.14321118 | Gene A |
| SGN008779 | 1031 | 4.32838036 | Gene A |
| SGN008779 | 1031 | 3.05104187 | Gene A |
| SGN008780 | 1032 | 2.20102518 | Gene A |
| SGN008780 | 1032 | 1.91115982 | Gene A |
| SGN008781 | 1033 | 0.13457689 | Gene C |
| SGN008781 | 1033 | 0 | Gene C |
| SGN008782 | 1034 | 1.17617006 | Gene C |
| SGN008782 | 1034 | 0.32513646 | Gene C |
| SGN008782 | 1034 | 0 | Gene C |
| SGN008783 | 1035 | 0.09980008 | Gene C |
| SGN008783 | 1035 | 0 | Gene C |
| SGN008783 | 1035 | 0 | Gene C |
| SGN008784 | 1036 | 6.04145714 | Gene C |
| SGN008784 | 1036 | 4.60291001 | Gene C |
| SGN008785 | 1037 | 2.33054617 | Gene C |
| SGN008786 | 1038 | 2.17424483 | Gene C |
| SGN008786 | 1038 | 1.7169595 | Gene C |
| SGN008787 | 1039 | 0.73367513 | Gene C |

TABLE 21
Editing of 2 additional genes by LPG10196
by plasmid delivery in HEK293T cells

| sgRNA | Percent editing | Gene |
|---|---|---|
| SGN008764 | 6.40775496 | Gene D |
| SGN008764 | 6.36429188 | Gene D |
| SGN008765 | 5.85900556 | Gene D |
| SGN008765 | 4.93704309 | Gene D |
| SGN008766 | 1.62050983 | Gene D |
| SGN008766 | 1.20221383 | Gene D |
| SGN008768 | 1.02012565 | Gene D |
| SGN008768 | 0.49157556 | Gene D |
| SGN008769 | 2.52760451 | Gene D |
| SGN008770 | 1.19088503 | Gene D |
| SGN008770 | 0.75523987 | Gene D |
| SGN008770 | 0 | Gene D |
| SGN008788 | 5.02264123 | Gene E |
| SGN008788 | 4.66534168 | Gene E |
| SGN008788 | 0 | Gene E |
| SGN008789 | 0.07087023 | Gene E |
| SGN008789 | 0 | Gene E |
| SGN008789 | 0 | Gene E |

[1451] To demonstrate editing of mammalian cells with an alternative delivery format of LPG10196, mRNA nucleofection delivery was tested with primary T-cells. Purified CD3+ T-cells or peripheral blood mononuclear cells (PBMCs) were thawed, activated using CD3/CD28 beads (ThermoFisher) for 3 days, then nucleofected using the Lonza 4D-Nucleofector X unit and Nucleocuvette strips. The P3 Primary Cell kit was used for mRNA delivery. Cells were transfected using the EO-115 program for mRNA delivery. Cells were cultured in CTS OpTimizer T cell expansion medium (ThermoFisher) containing IL-2, IL-7, and IL-15 (Miltenyi Biotec) for 4 days post nucleofection before being harvested using a Nucleospin Tissue genomic DNA isolation kit (Machery Nagel). Amplicons surrounding the editing sites were generated by PCR and subjected to NGS sequencing using the Illumina Nextera platform following the method in Example 4.

TABLE 22
Editing of 2 genes by LPG10196 by mRNA delivery in T cells

| | sgRNA target | | |
|---|---|---|---|
| | sequence | Percent | |
| sgRNA | SEQ ID NO | Editing | Gene |
| SGN005324 | 1046 | 0.26644188 | Gene A |
| SGN005326 | 1047 | 0.21256232 | Gene A |
| SGN005328 | 1048 | 0.11126232 | Gene A |
| SGN005330 | 1049 | 0 | Gene B |
| SGN005329 | 1050 | 0 | Gene B |
| SGN005333 | 1051 | 0 | Gene B |
| SGN005332 | 1052 | 0 | Gene B |
| SGN005328 | 1048 | 0 | Gene A |
| SGN005327 | 1053 | 0 | Gene A |
| SGN005333 | 1051 | 0 | Gene B |
| SGN005332 | 1052 | 0 | Gene B |
| SGN005331 | 1054 | 0 | Gene B |
| SGN005330 | 1049 | 0 | Gene B |
| SGN005329 | 1050 | 0 | Gene B |
| SGN005327 | 1053 | 0 | Gene A |
| SGN005326 | 1047 | 0 | Gene A |
| SGN005325 | 749 | 0 | Gene A |
| SGN005324 | 1046 | 0 | Gene A |
| SGN005333 | 1051 | 0 | Gene B |
| SGN005332 | 1052 | 0 | Gene B |
| SGN005331 | 1054 | 0 | Gene B |
| SGN005330 | 1049 | 0 | Gene B |
| SGN005329 | 1050 | 0 | Gene B |
| SGN005328 | 1048 | 0 | Gene A |
| SGN005327 | 1053 | 0 | Gene A |
| SGN005325 | 749 | 0 | Gene A |

TABLE 23
Editing of an additional gene by LPG10196
by mRNA delivery in T cells

| sgRNA | Percent Editing |
|---|---|
| SGN008450 | 0.04128176 |
| SGN008449 | 0.04118244 |
| SGN008449 | 0.03958039 |
| SGN008450 | 0.03853235 |
| SGN008450 | 0.03516029 |
| SGN008449 | 0 |

### Example 13: LPG10190, LPG10194, LPG10195, LPG10197, LPG10198, LPG10200, LPG10203, LPG10204, LPG10205, LPG10207, and LPG10208 are Able to Edit Multiple Target Loci in Mammalian Cells when Delivered as Plasmids

[1452] Guide RNAs targeting several genes were designed for robustness testing of multiple RGNs in HEK293T cells by plasmid delivery. These guides were tested under optimal editing conditions for HEK293T cells in a 96-well plate which involved seeding 10,000-15,000 cells on day 1, lipofection using Lipofectamine 3000 on day 2, and genomic DNA extraction on day 4. Lipofections were performed by mixing 160 ng of LPG10196-encoding plasmid and 40 ng of guide RNA-encoding plasmid, and 0.4 μl of p3000 in Opti-MEM. Then, 0.3 μl of Lipofectamine 3000 diluted in Opti-MEM was added to the plasmid mixture and incubated for 15 mins before adding to cells. Regions around as described in Example 4. Results are shown in Table 24.

TABLE 24
Editing of multiple genes by various RGNs
by plasmid delivery in HEK293T cells

| | | sgRNA target | | |
|---|---|---|---|---|
| | | sequence | | |
| RGN | sgRNA | SEQ ID NO | Indel Rate | Gene |
| LPG10190 | SGN005942 | 874 | 0.36701908 | Gene A |
| LPG10190 | SGN005948 | 875 | 0.2889043 | Gene A |
| LPG10190 | SGN005945 | 876 | 8.66876033 | Gene A |
| LPG10190 | SGN005944 | 877 | 0.04169017 | Gene A |
| LPG10190 | SGN005900 | 878 | 0 | Gene B |
| LPG10190 | SGN005904 | 879 | 0 | Gene B |
| LPG10190 | SGN005902 | 880 | 0 | Gene B |
| LPG10190 | SGN005906 | 881 | 1.45647858 | Gene B |
| LPG10190 | SGN005903 | 882 | 0 | Gene B |
| LPG10190 | SGN005905 | 883 | 6.13382844 | Gene B |
| LPG10190 | SGN005901 | 884 | 0 | Gene B |
| LPG10190 | SGN006014 | 885 | 0.01352876 | Gene C |
| LPG10190 | SGN006012 | 886 | 0 | Gene C |
| LPG10190 | SGN006013 | 887 | 0.86899015 | Gene C |
| LPG10190 | SGN006015 | 888 | 0.04033643 | Gene C |
| LPG10190 | SGN005907 | 889 | 0 | Gene D |
| LPG10190 | SGN005908 | 890 | 0 | Gene D |
| LPG10190 | SGN005913 | 891 | 0.06573541 | Gene D |
| LPG10190 | SGN005911 | 892 | 0 | Gene D |
| LPG10190 | SGN005912 | 893 | 0 | Gene D |
| LPG10190 | SGN005909 | 894 | 0 | Gene D |
| LPG10190 | SGN005910 | 895 | 0 | Gene D |
| LPG10194 | SGN005312 | 896 | 0.030428 | Gene B |
| LPG10194 | SGN005309 | 897 | 21.0121199 | Gene B |
| LPG10194 | SGN005313 | 898 | 2.20160132 | Gene B |
| LPG10194 | SGN005311 | 899 | 7.09320917 | Gene B |
| LPG10194 | SGN005310 | 900 | 0.19347422 | Gene B |
| LPG10194 | SGN005308 | 901 | 0.53503148 | Gene D |
| LPG10194 | SGN005306 | 902 | 0 | Gene D |
| LPG10194 | SGN005304 | 903 | 0.35365696 | Gene D |
| LPG10194 | SGN005307 | 904 | 0.83313993 | Gene D |
| LPG10194 | SGN005305 | 905 | 0.15847329 | Gene D |
| LPG10195 | SGN005321 | 906 | 1.60788133 | Gene B |
| LPG10195 | SGN005322 | 907 | 7.9384461 | Gene B |
| LPG10195 | SGN005319 | 908 | 1.16046009 | Gene B |
| LPG10195 | SGN005323 | 909 | 1.35810358 | Gene B |
| LPG10195 | SGN005320 | 910 | 1.98190455 | Gene B |
| LPG10195 | SGN005314 | 911 | 0.48531898 | Gene D |
| LPG10195 | SGN005316 | 912 | 0.06789522 | Gene D |
| LPG10195 | SGN005317 | 913 | 0.033033 | Gene D |
| LPG10195 | SGN005315 | 914 | 3.20645014 | Gene D |
| LPG10195 | SGN005318 | 915 | 0 | Gene D |
| LPG10197 | SGN005341 | 916 | 1.42612491 | Gene B |
| LPG10197 | SGN005342 | 917 | 2.89469264 | Gene B |
| LPG10197 | SGN005339 | 918 | 0.65474111 | Gene B |
| LPG10197 | SGN005343 | 919 | 2.3066702 | Gene B |
| LPG10197 | SGN005340 | 920 | 0.11537443 | Gene B |
| LPG10197 | SGN005336 | 921 | 0 | Gene D |
| LPG10197 | SGN005334 | 922 | 1.06043066 | Gene D |
| LPG10197 | SGN005337 | 923 | 0.96785633 | Gene D |
| LPG10197 | SGN005338 | 924 | 0 | Gene D |
| LPG10197 | SGN005335 | 925 | 0.02076962 | Gene D |
| LPG10198 | SGN005346 | 926 | 0 | Gene D |
| LPG10198 | SGN005344 | 927 | 0.01407238 | Gene D |
| LPG10198 | SGN005347 | 928 | 0 | Gene D |
| LPG10198 | SGN005348 | 929 | 0.02833437 | Gene D |
| LPG10198 | SGN005345 | 930 | 0 | Gene D |
| LPG10200 | SGN005354 | 931 | 0.49286011 | Gene D |
| LPG10200 | SGN005355 | 932 | 0.03016978 | Gene D |
| LPG10200 | SGN005356 | 933 | 0 | Gene D |
| LPG10200 | SGN005357 | 934 | 0.0899422 | Gene D |
| LPG10200 | SGN005358 | 935 | 0.01369655 | Gene D |
| LPG10200 | SGN005359 | 936 | 0 | Gene B |
| LPG10200 | SGN005360 | 937 | 2.3326179 | Gene B |
| LPG10200 | SGN005361 | 938 | 0.88360097 | Gene B |
| LPG10200 | SGN005362 | 939 | 4.12895472 | Gene B |
| LPG10200 | SGN005363 | 940 | 27.8668507 | Gene B |
| LPG10203 | SGN005364 | 941 | 3.22685247 | Gene D |
| LPG10203 | SGN005365 | 942 | 13.9042672 | Gene D |
| LPG10203 | SGN005366 | 943 | 14.2677892 | Gene D |
| LPG10203 | SGN005367 | 944 | 15.0606662 | Gene D |
| LPG10204 | SGN005373 | 945 | 23.5520127 | Gene B |
| LPG10204 | SGN005374 | 946 | 37.4986793 | Gene B |
| LPG10204 | SGN005376 | 947 | 7.37352091 | Gene D |
| LPG10204 | SGN005377 | 948 | 9.22081113 | Gene D |
| LPG10204 | SGN005378 | 949 | 2.69392448 | Gene D |
| LPG10204 | SGN005379 | 950 | 1.51490663 | Gene D |
| LPG10204 | SGN005380 | 951 | 2.17714153 | Gene B |
| LPG10204 | SGN005381 | 952 | 0.04262038 | Gene B |
| LPG10204 | SGN005382 | 953 | 25.5481725 | Gene B |
| LPG10205 | SGN005383 | 954 | 23.8069402 | Gene B |
| LPG10205 | SGN005384 | 955 | 43.8835176 | Gene B |
| LPG10205 | SGN005386 | 956 | 4.19188596 | Gene D |
| LPG10205 | SGN005387 | 957 | 5.0923384 | Gene D |
| LPG10205 | SGN005388 | 958 | 0.9325359 | Gene D |
| LPG10205 | SGN005389 | 959 | 0.51241228 | Gene D |
| LPG10205 | SGN005390 | 960 | 1.09905382 | Gene B |
| LPG10205 | SGN005391 | 961 | 0.10620702 | Gene B |
| LPG10205 | SGN005392 | 962 | 17.2982248 | Gene B |
| LPG10205 | SGN005393* | 963 | 0.09406381 | Gene B |
| LPG10205 | SGN005394* | 964 | 0.27666136 | Gene B |
| LPG10205 | SGN005396* | 965 | 0 | Gene D |
| LPG10205 | SGN005397* | 966 | 0 | Gene D |
| LPG10205 | SGN005398* | 967 | 0 | Gene D |
| LPG10205 | SGN005399* | 968 | 0 | Gene D |
| LPG10205 | SGN005400* | 969 | 0 | Gene B |
| LPG10205 | SGN005401* | 970 | 0 | Gene B |
| LPG10205 | SGN005402* | 971 | 0.30758559 | Gene B |
| LPG10207 | SGN005403 | 972 | 6.8683675 | Gene D |
| LPG10207 | SGN005404 | 973 | 6.14261875 | Gene D |
| LPG10207 | SGN005405 | 974 | 10.9052765 | Gene D |
| LPG10207 | SGN005406 | 975 | 15.9374664 | Gene D |
| LPG10207 | SGN005407 | 976 | 21.4552493 | Gene D |
| LPG10207 | SGN005408 | 977 | 28.4481502 | Gene B |
| LPG10207 | SGN005409 | 978 | 35.3689448 | Gene B |
| LPG10207 | SGN005410 | 979 | 38.9217997 | Gene B |
| LPG10207 | SGN005411 | 980 | 21.7166823 | Gene B |
| LPG10207 | SGN005412 | 981 | 17.189728 | Gene B |
| LPG10208 | SGN005373 | 982 | 37.4768411 | Gene B |
| LPG10208 | SGN005374 | 983 | 47.1793232 | Gene B |
| LPG10208 | SGN005375 | 984 | 0.92766506 | Gene D |
| LPG10208 | SGN005376 | 985 | 13.6968015 | Gene D |
| LPG10208 | SGN005377 | 986 | 25.6968565 | Gene D |
| LPG10208 | SGN005378 | 987 | 3.3814505 | Gene D |
| LPG10208 | SGN005379 | 988 | 3.00935013 | Gene D |
| LPG10208 | SGN005380 | 989 | 3.20853702 | Gene B |
| LPG10208 | SGN005381 | 990 | 0.58667551 | Gene B |
| LPG10208 | SGN005382 | 991 | 27.5155924 | Gene B |

*LPG10205 sgRNAs used the LPG10205 sgRNA backbone sequence set forth as SEQ ID NO: 80, except for those that have a *, which used the LPG10205 sgRNA backbone sequence set forth as SEQ ID NO: 81

The application's sequence listing, which the Patent Office published only in electronic form, follows.

SEQUENCE LISTING (1054 sequences)

SEQ ID NO: 1 - protein, 1077 aa, Bacillus sp.
  source 1..1077: note = Bacillus cytotoxicus
  REGION 1..1077: note = LPG10165
MKYSIGLDIGIASVGWAVINEDIERIEDMGIRIFDAAENPKDGSSLSTPRREARSTRKRLRRRRHRVERIRQFIIQKGLLTQVQMEQLYDWKAEDLDIWLIRVNGLERKLTDREFARVLIHLVKNRGFKSNRKSELKEGDNGVVLSAVQENKQLMEEKGYQTIAEMLLFDERFEGCKRNKGGAYSHVVARSDLEHEIRLIFQKQREYGHAFSTTENEEAYINIWSSQRPFATKDDIAKKIGYCTLEPKEKRTPKSTYTFERFRAIDKLNRLRILSAITPSRELTQEERDDVLNSLFSKKEVKYKELRKLLRLKDEQRFNEIYYAPNESNEKNENRTFLSLESQHKIRAIIKQVEGKNVNDSYRPIDLDTFAYALTVFKDDQDIRDYLQNRYVSSNGKKVLNLANLEYKEKLIEELLQLSFTKFGHLSLKALKNILPYMEQGMPYHQACAEAGYTFNQRVNKEKQYLLPVIPTKDIANPVVIRSMSQVRKVVNGIIKKYGSPSAIYIELAREMGRVYKERKELEKQYNKNREINEGAKKHIVELHPQLGDPRGHDILKYKLWKEQDGRCAYSFQPISIERLFHIGYAEVDHIIPYSRSFDDSNSNKVLVIAAENQNKQNRTPYEWFGHNEIKWQKFTSFVTTMKVSKKKKGLLLKKDFDEDQAEEFRSRHLNDTRYITRFIKTFIEDNLLFRTEENRKQYAHTVNGAYTSLMRKRWGFNKNRQENDLHHALDAVIIAVSLPFKHRVSAYFKRREEYAHNQLKREGEFFPEPWPEFIHELEIRMMQEPEKMKLAMESLDLKTYDESFINELNPVFVSRMPKRSIKGQIHEETLKRVRGYTEDGYIRTVKKVRLDQIPFDKNGDFSMFGKETDMKTYEAIKNRYLEFGKDKKKAFNSPLYKPAKNPENAPIIRSVKIEDKANRVVMLDEKTAADNASIVRTEVFRHKGTGNYFLTPVYVADVLSKRIPDRVITTKKPYSEWKRITDDFEFLFSLYPNDLIRVKMPKEKETKTNMKEKYVWQENFMYFKGVHSGSAGVRMIDHMNSFEDEIGVQKLIIFEKYQVDPLGRITKVHGEKRHGI

SEQ ID NO: 2 - protein, 1145 aa, Nitrobacter winogradskyi
  REGION 1..1145: note = LPG10166
MGIKNSKPYRLGLDLGSNSLGWFVTYLEKRGDHDEPVALGPGGVRIFPDGRDPQSGMSNAVDRRMARGARKRRDRFVERRKELIAALVKCGLLPNDSRERRTLERLDPYALRRAALIDALPAHHIGRALFHLNQRRGFQSNRKTDSKQSEDGAIKQAATKLMAVMAEESAATLGSFLADRHLSDAYLDRQNAVRAELVRLGKDHLTGNARKKAWAKTRKRLFGDEVLPPKDGPDGVRARVTMIGTKASYDFYPTRAMVLDEFNAIWAAQREHQPAMTDEAKKEIEHIIFFQRPLKPAIVGKCTLDPATRPFKEDPEGYRAPWSHPLAQRFRIFSEARNLEIREIGKGSRKLTKEQSDLVVAALLAHKEVKFDKLRTLLKLPPEAKFNLESDRRAALDGDATAARLSDKKGFGKVWRGFPLERQIAIVTKLEETENEDELIAWLEKECALDGAAAARVANTTLPDGHCRLGLRAIGKIVPIMQNELDDDGVSGAGYHIAAKRAGYDHAKLPTGEQLNRLPYYGQWLADAVVGTGDARDGKEKQYGQFPNPTVHIGLGQLRRLVNELIDNYGPPTEIAIEFTRALKLSEQQKADWQREQRRNQDKNTARAAELGKFGFPANPRNLLKMRLWEELAADPLDRKCIYTGEQISIERLLSEEVDIDHILPIAMTLDDSAANKIICMRYANRHKRKMTPVEAFGSSPTLQGHRYDWDAIAARAANLPRNKRWRFDANAREEFEKRGGFLARQLNETGWLARLAKQYLGAIADPNRIWVVPGRLTAMLRGKWGLNALLPDHNYAGVQDKAEEFRASTDDMEFSGIKNRADHRHHAIDGLVVALTDRSLLWKMANAYDEEREKFVIEPPWATMRDDLKSALDKMVVSHKADHGIEGKLHEDTAYGVLKEPEKIDDQDKDGANLVYRKAVEALNDNEIDRIRDRRLRTIVRDHVDAEKKKGVGLADALRQLTELRDHPQIKHGLRHVRILKKEKSEYLVPIANRKTGQFYKAYSAGENFCVEVFETADGKWDGEAVRRFDANQQNAGAKTPHALQWRIAHPDAKLVMRIHKGDLIALDYNGTRTIMVVRQLEASNNRFKLAPHNETGNLQTRHNTANDVDPFRWLIASYNALKKANAVPVRVDELGRVWRIAPG

SEQ ID NO: 3 - protein, 1071 aa, Bacillus sp.
  source 1..1071: note = Bacillus toyonensis
  REGION 1..1071: note = LPG10167
MSELDYRIGLDIGTNSIGWGVIELFWKKDRERYEKVKIVDKGVRMFDKAEIPKTGASLAEPRRIARSSRRRLNRKSQRKKDIRNLLVQHGVITQKELDSLYPLSKKAMDIWDIRLDGLDRLLNHFEWTRLLIHLAQRRGFKSNRKSELKDAETGKVLSSIQVNEKRLSLYRTVGEMWIKDADFIKYDRRRNSPNEYVFSVSRANLEKEIVTLFETQRKFQSPYASKNLQEAYLQIWAHQLPFASGNAILNKVGYCSLLKGKERRIPKATYTFQYFSALDQVNRTRLGPDFQPFTQEQREIILDKMFQRTDYYKKKTVPEVTYYDIRKWLELDETIQFKGLNYDPNEELKKIEKKPFINLKAFYEIKKVVANYAERTNEAFSTLDYDAIAYALTVYKTDKDIRSYLKSSHNLSKRCYDDQLIEELLSLSYTKFGHLSLKAINYVLPIMQEGRTYKEAADQLGYDTTGLKKEKRNKFLPLIPDEITNPIVKRALTQARKVVNAIIRRYGSPHSVHIELARELSKNHDERKKIVSAQDENYKNNKGAISVLSEYGILDPTGYDIVRYKLWKEQGERCAYSLKEIPPDTFFNELKKERNGSPILEVDHVLPYSQSFIDSYHNKVLVYSDENRKKGNRIPYTYFLETNKDWEYFETYVRSNKLFSKKKREYLLKKAYLPRESELIKERHLNDTRYASAFLKNFIEQNLQFKEVEDNLRKRRVQTVNGVITAHFRKRWGLEKDRQETYLHHAMDAIVVACTDHHMVTRVTEYYQIRESNKSVKKPYFPMPWEGFRDELLSHLASQPIAKKISEELKAGYQSFDYIFVSRMPKRSVTGAAHDQTIMRKGGIDKKGKTIIIKRLQLKDIKFDENGDFKMVGKEQDMATYEAIKRRYLEHGKKSEKAFETPLYKPSKSGRGNLIKRVKIEVQTKSFVREVNGGVAQNGNLVRVDLFEKDAKYYMVPIYVPDTVFSELPNKAVTSSKGYKQWLTLDNSFMFKFSLYPYDLVRLVKGNEDRFLYFGTLDIDSDRLIFKDVNKPSKQTEYRYSLKTIEDLEKYEVGVLGDLRLVRKETRRNFQ

SEQ ID NO: 4 - protein, 1072 aa, Bacillus sp.
  source 1..1072: note = Bacillus toyonensis
  REGION 1..1072: note = LPG10168
MSELDYRIGLDIGTNSIGWGAIELSWNKDRERYEKVRIVDKGVRMFDKAEIPKTGASLAEPRRIARSSRRRLNRKSQRKKDIRNLLVQHGVIIQKELDSLYPLSKKSMDIWDIRLDGLDRLLNHCEWARLLIHLAQRRGFKSNRKSELKDTETGKVLSSIQVNEKRLSLYRTVGEMWMKDPDFNKYDRKRNSPNEYVFSVSRADLEKEIVTLFEAQRKFQSSYASKDLQETYLQIWAHQLPFASGNAILNKVGYCSLLKGKERRIPKATYTFQYFSALDQVNRTRLGPDFQPFTKEQREIILDKMFQRTNYYEKKTIPEVTYYDIRKWLELDETIQFKGLNYDPNEELKKIEKKPFINLKAFYEIKKVVANYAERTNEEFSTLDYDAIAYALTVYKTDKDIRSYLKSSHNLSKRCYDDQLIEELLSLSYTKFGHLSLKATNYVLPIMQEGRTYKEAADQLGYDTTGLKKEKRNKFLPLIPDEITNPIVKRALTQARKVVNAIIRRYGSPHSVHIELARELSKNHDERKKIVSAQDENYKKNKGAISVLSEYGILDPTGYDIVRYKLWKEQGERCAYSLKEIPPDTFFNELKKERNGSPILEVDHVLPYSQSFIDSYHNKVLVYSDENRKKGNRIPYTYFLETNKDWEYFETYVRSNKLFSKKKREYLLKKAYLPRESELIKERHLNDTRYASAFLKNFIEQNLQFKEVEDNLRKRRVQTVNGVITAHFRKRWGLEKDRQETYLHHAMDAIVVACTDHHMVTRVTEHYQIRESNKSVKKPYFPMPWEGFRDELLSHLASQPIAKKISEELKAGYQSFDYIFVSRMPKRSVTGAAHDQTIMRKGGIDKKGKTIIIKRLQLKDIKFDENGDFKMVGKEQDMATYEAIKRRYLEHGKKSEKAFETPLYKPSKSGRGNLIKRVKIEVQTKSFVREVNGGVAQNGNLVRVDLFEKDAKYYMVPIYVPDTVFSELPNKAVTSSKGYKQWLTLDNSFTFKFSLYPYDLVRLVKGDEDRFLYFSTLDIDSDRLIFKDVNRPSKQTEYRYSLKTIEDLEKYEVGILGDLRLVRKETRRNFNR

SEQ ID NO: 5 - protein, 1053 aa, Staphylococcus sp.
  source 1..1053: note = Staphylococcus_A sciuri
  REGION 1..1053: note = LPG10169
MKKNYILGLDIGITSVGYGVIDYETRDVIDAGVRLFKEANVENNEGRRSKRGTRRLKRRRRHRLQRVKKLLFDYNLLTDHSELTGINPYEARVKGLSQKLSEEEFSAALLHLAKRRGVHNVNEVEEDTGNELSTKEQISRNSKALEEKYVAELQLNRLKAEGEVRGSINRFKTSDYVKEAKQLLKVQESYHQLDQSFIDTYIDLLETRRTYYEGPGEDSPFGWKDIKEWYEMLMGHCTYFPEELRCVKYAYNADLYNALNDLNNLIIARDENEKLEYYEKFQIIENLFKQKKKPTLKQIAKEILVNEEDIKGYRVTSTGKPEFTNFKVYHDIKDITARKEILENAELLNQIAEILTIYQSSVDIQEELAKLNLELTQEEIEQISKLTGYTGTHSLSLKAINLILDELWHTNDNQMTIFNRLKLVPKKVDLSQQKEIPTTLVDDFILSPVVKRSFIQSIKVINAIIKKYGLPKDIIIELAREKNSKDAQKIINEMQKRNRQTNERIEEIIRTTGKENAKYLIEKIKLHDMQEGKCLYSLEAIPLEDLLNNPFNYEVDHIIPRSVSFDNSFNNKVLVKQEENSKKGNRTPFQYLSSSDSKISYGTFKKHILNLAKGKGRISKKKKEYLLEERDINRFSVQKDFINRNLVDTRYATRELMNLLRSYFRVNDLDVKVKSINGGFTSFLRRKWEFKKERNKGYKHHAEDALIIANADFIFKEWKKLDKAKKVMENQTVEDKQAESMPKIETEQEYKEIFITPHQIQHIKDFKDYKYSHRVDKKPNRELINDTLYSTRKDDKSNTLIINNLNGLYDKDNDKLKKLINKSPEKLLMYHYDPQTYQKLKLIMEQYGDEKNPLYKYYEETGNYLTKYSKKDNGPVIKKIKYYGNKLNAHLDITDDYPNSRNKVVKLSLKPYRFDVYLDNGVYKFVTVKNLDVIKKENYYEINSKCYEKAKKLKKISDQAEFIASFYNNDLIKVNGELYRTIGVNNDLLNRIELNMIDITYKEYLENMNDKRPPRIIKTIARKTQSIKKYSTDILGNLYEVKSKQHPQMIMKG

SEQ ID NO: 6 - protein, 1083 aa, Bacillus sp.
  source 1..1083: note = Bacillus mosaicus
  REGION 1..1083: note = LPG10171
VKLQYVLGLDIGIASCGWAVINTEKERIEDLGVRIFDKAENPKDGKSLATPRRDARSTRRTLRRKKHRMQRIKILLVKHGLLSKTELDHLYESATENDVWDLRLNALERRLNPKEFARVLIHLAKRRGFKSNRKETTLSESGQILENISENQQIMEQQNYRTVGEMILKDKKFENHKRNKDGTYIGTVTRQQLQDEIHMIFNAQRLFKNNFATEEFESHYLEIWSSQRPYASKDQIEKMIGYCTLEPKEKRAPKASWSFQYFVALQTINNLRLISKDRIEELSFEEKKQIMNLALEKPIVKYIDIRKLLSISNDLHFNNLLYSTDTVDTTVENRKCIELKEYHSINKVYKQIYGKGVPNLLPIDYDTIAYALTIFKDDKDILEYLQNKYVNAKGKPINNSAKKTYDDIFIQALLTLNFTKMGHLSFKSLKNIIPFLEDGLSYDKACEKAGYNFKGTSYTEKTKYLPVIPQNTNPVVHRALSQTRKVINAIIKKYGSPKAIHIETARELSKTFQERKEIDSMYQDNSKKNEHAIRKLKELGNINPSGINIVKFKLWNEQDGRCMYSGKYIEPHRLFEEGYTEVDHVLPYSRSLDDSYNNKALTLGTENQGKGNKTPYEFMGNTSIWNEFETRVQSNKKINKRKQQKLLLQNFSHAREQEFIERNLNDTRYATIYLSSLIQQHLIFSESSREKKVHTVSGIITSHLRSRWGFNKDRKEGHIHHALDAVIVAVTSDHMIQRVTKYYKLKELNRNLQAKRIPFPEPWEGFRLELEARISPNTQQYLKGIRFKNYADINLTEIKPIFVSRMPKRSITGELHQETIRKFIGYNEKGKVLTTIKTKLEDIPFDANGDFPMYGKETDLYTYNAIKERYLSHKKDKRKSFQEPLYKPTKTGEIGPLIKSIKIIDTRTIVNPVNQGKGVVYNSKIARTDVFKKNDKYYLIPIYTIDLMKNILPQKAITAGKGYEDWTTIDHSFTFLFSLFPNDLIQIVPTKNRTIKAKTTVSKKEVLLPSLTGYFKGVHSGTAGITVETHDGSVIANIGSKQLLIFEKYQVDILGHYTKIKEEKRIGMATYNDNKKSTAFSSL

SEQ ID NO: 7 - protein, 1488 aa, unidentified
  REGION 1..1488: note = LPG10186
MAKQKYTVGLDIGTNSVGWAVINQDFKLVSGKKHINDNGKQKRSRTNLWGVRLFDAAETAEDRRLKRGMRRRIARRKERLNYLRGIFQADILAFDDSFFIRMDESFLQDDDKQATAFSYRDQSGAMQTRVVTEKEAVKYPLFNGKSGSGETYTDESAYYNQYPTIYHLRQRLIDNPAQADLRLVYLAMHHILKYRGHFVNQGQTFDLGNINIAGNLTSALDKLDEASSFKFGLADVDADQANAILKNKQWSASKKAYELNALFEIIQDTVYRRENETQAVTYDSLTVKQQEKWLAEKQKQVKAFLTGIVGNTISPKDIFANKDYDKKQNEDFPEKIKYSNENFEEQIGALEKYLDETEVAAIVAGKDVYESLVLSNILTKSTLSGSMIEKYNVHGAQLKSLKSFSRKVSAEFYDKLFNVVKDEKGKPHIGVYAQYVDGVGNPAKRLAREDFYDALKKVFESEFKGLTFPVGEKGIDFTKTDLSADRVAFIREMNEAINLENYLPKQRQADNGEIPYQVHEHELIRIIENQKQYYPFLGDKVQVAYEDESGQTQVRSEYKIQVLFKFRIPYYVGTLAKNSGWVNEDGKKLVARNVAAKNSWVVRNSDERVTPWNFEQVINKEASSINFIERMTNFDTYLPNEKVLPKNSLLYQEFIVNNELISSGYYLNGRKEYFLPEQRQRIITRLFKRYRKVSAKQMLDFLKNEYQIKLDDDPKKLFGLDTFVKVPSYNGSLSTVVDLTKKMGISEDLIANYPERFEEIIKWQTIFEDKKILKKTIREVNHNKWSGMLTAEQVNKLSKRHYTGWGRLSQKLLDGVKTSQGRTIIESLREGICDNFMRLIEDEKIAEFIANAQVAGAKDGVLAYDLVDQLPGSPAIKKGIWQSLRVLQELEHYLGRDAIGKVVIEMSRDDESSRRTKARKQQLEEFYKKFKESTGSDVTAELKRELSEKDAKEIDDEKVFLYFLQNGKSMYSGDQLYLSRLADYQVDHIVPQTYIKDDSLDNKVLVTQRDNQNKGGDTPSQTVVTRMNSYWEMLAKNGQVSPRKLANLKKGPITLKQREGFINRQLVENRQITKHVANILMNYYTGTDTLVLTPKSGLTSQLRSGLIYELNPAFDEAKALDRGKAYQVERYTTVKLHDRFVKNRKLNDYHHAHDAYLNAFVAQYVYQEHPEWKNAWVYGKYPRNGQADFGKWATQRKQKSLQLLSSMANDVWNLEDPDTMEKTILNRDETFEQMRQTLCYRNINIVKKLETQTGKFGDESVYKKGNKADHYSLGLKRKYPPQKYGGTKGAISAVTALVKDNSGRVIPVSISASDYDSYQNASDKLAWLLMRKKNIAEILVASLPKYTKYELPSGALRLLASYQEAQSAVELPMLNLGLMDDEAKVLNLYDQLAQFIADNKLFTDKKIALLKGEMRAAFDRLEEFKDKQKVIDELLGVTNGSNQGLQALNSIGLGTSNQRLKSGNTMTNGVTLINESVTGLYLTRTTYN

SEQ ID NO: 8 - protein, 1077 aa, unidentified
  REGION 1..1077: note = LPG10190
MKYSIGLDIGIASVGWAVINEDIERIEDFGVRIFDAAENPKDGASLSTPRREARSTRKRLRRRRHRVERIRQLIIQKGLLTQVQMEQLYDWKAEDLDIWLIRVNGLERKLTDREFARVLIHLAKNRGFKSNRKSELKEGDNGVVLSAVQENKQLMEEKGYQTIAEMLLFDERFDGCKRNKGGAYSHVVARSDLEHEIRLIFQKQREYGHAFATIENEEGFVSIWASQRPFATKDDIAKKIGYCTLEPKEKRTPKSTYTFERFRAIDKLNRLRILSSTIPSRPLVQEERDDVLNTLFSKKEVKYKELRKLLKLKDAERFNEIYYDPNESNEKNENRTFLSLESQHKIRTIIKQVEGKNINDSYRPIDLDTFAYALTVFKDDQDIRDYLQNRYVSSNGKKVLNLANLEYKEELIEELLQLSFAKFGHLSLKALKNILPYMEQGMPYHQACAEAGYEFNQRVNKEKQYLLPVIPTKDIANPVVIRSLSQVRKVVNGIIKKYGSPSAIYIELAREMGRVYKERKELEKQYNKNREINEGAKKHIVELHPQLGDPRGHDILKYKLWKEQDGRCAYSFQPISIERLFHIGYAEVDHIIPYSRSFDDSNSNKVLVIAAENQNKQNRTPYEWFGHNETKWQEFTSFVTTMKVSKKKKGLLLKKDLDEEQAEEFRSRHLNDTRYITRFIKTFIEDNLLFRTEESRKQYVHTVNGAYTSLMRKRWGFNKNRQENDLHHALDAVIIAVSLPFKHRVSAYFKRREEYAHNQLKREGEFFPEPWPGFIHELEIRMMQDSEKMKLAIESLDLKTYNESFINELKPIFVSRMPKRSIKGQIHEETLKRVRGLTETGYILTVKKTRLDQIPFDKNGDFPMFGKETDMKTYEAIKNRYLEFGKNKEKAFSTPLHKPAKNPNNAPIIRSVKIENKTNRVVMLDDKTAADNASIVRTEVFRHKETGNYFLTPVYVADALSKRVPDRLITPKKPYSEWKRITDDYEFLFSLYPNDLIRVKMPREKEAKTHAGEKCLWQENFVYFKGVDSADARIKVVDHMNSFEDRVGTQRLVTFEKYQVDPLGGINKVHGEKRYGF

SEQ ID NO: 9 - protein, 1061 aa, unidentified
  REGION 1..1061: note = LPG10191
MSKVLGLDIGISSVGWGIIDSQSGEIIDAGVRLFEEATRNANEDRRTFRGSRRLKRRRTHRLEQLKQLLTEVGLPLESIGVENPYEARRDAIYGEVTKERLVAAIYHLVKRRGVVLDAPEEESKVVNELSTKDQLAKNRKLLETKYICEIQLERINDSHEKMRNHENRFRTADYVIEAKAILAKQKEFHEELANEFIEKVINLIERRREYFDGPGSEKSPTPYGQYFLNKQGKLENVSMINKMRGKCTYFPDELRIPKMSYTADLFNLLSGDLNKLQIEGEYLTVEDKNYILENFIHKGKNITLPQLLKYKGVDSDAVVTGYRMDMKTDKPTFTDFKGYKNILKIVKEHDLPIDLLHNYDVLDEIVNILTAEKSYTRRAEQMNELLTMYSDTARRKIVTAFKESTDFVGYHALSKKAMMLILNELWATNKNQMELFSELKLEEKRVSGLTKTKNIQFDDDAILSTVAKRAHRETIKIVNEARKKYGEFETIVVETAREKNSDEKRKLYVDFQRNIGKLEKKMADLLSVKNLKDLRLNGKQHLALKLWDSQDGKCLYSGKAISLHEIVTNPTLFEIDHILPISLSFDDSQANKVLCYHAENQKKGQLTPFQYFMSGKTNRSFDQFKVEVLNLYKSRRITNKKKDYLLEQRDLQNNEELQKQFINRNLVDTQYAMRSFSMSLRTYFKANSIDTTVLSIRGSFTAALRRRARLNKDRDESYAHHAIDALIVAAIGKLPVFEFFKEFGMDEQGIIYNKETGEILGEDQFFEHKFMKLLRDLMNYESNIRYSHKVDRKGNRTMSNQTIYGTREKDGERYYLGKSDNIYQLDKNGVAPLLKRLAKSPDSFLIAEHNPELFSLIGKIVKEYPTADNPFKAYYNEHGYILKDGKVPVKILRYRDRKLGVHMNITDKYPGAKNDVVLLSIKGVRVDLYKNAEGNYKYLGVPYNWFKQVGNRLMLDLEKYEKEKKQSYKKIDDTYEFQMSLYKNDLFSFEKGGKYAERIFRGDSMPRQNKVEVDYVFKRKEEQKEGFLAPSTISNVIKYNVDVLGNRHKILKEIFNMYLQK

SEQ ID NO: 10 - protein, 1057 aa, unidentified
  REGION 1..1057: note = LPG10194
MSNRVPYRLALDLGTNSIGWCLLDLNGNGDPCGVRRMGVRIFPDGRDPKSKESLAADRRLARSMRRRRDRYLRRRSALMNALVAAGLMPADQAGRKALESEDPYELRARALTEPLTAGQVGRALFHLNQRRGFKSNRKAAGEENEAGKIKAGISALKAEIEASGETTLGAWLAARHRKRETVRARLDGAGAKASYEFYPERSLVHDEFQAIRTAQAPHHPDITAEQWDRIESVIFRQRPLRPVRPGKCTLFPDQERAPWALPVAQEFRILTEVGNLKLYRPGEEPRELSAGQHAQLFAKLCRSADLTFEKIRKELKLDPGLKVNLEGEKRDRLKGDAVTSALSAKKRFGPKWNALTPDDRRDIVGRLIEAEDEAELAGWLESVHGLASENAAHTAASPGLPDGYCRLSEKALVELVPLMRERLLRYDEAVRALDLHHSDFRPDGLLDELPYYGEPLERFIAFGSGEPSDPPELRLGRFPNPTVHIGLNELRKLVNRIVERWGKPADIVVELARDLKRSRDERDTIQREQAQNQRKNEDRFAKIKELGIDPRPDSMLRLRLWEELPKVGVGHVCVYTGEPIGIRRLLEGDVDIDHILPFSRTLSDGADNKIVCVRRANRFKRDRSPWEALGVTAVDGYSWAAIAERAEELPKNKRWRFLPDAMDRFEGERGFLDRQLVETRHLSRVARQYLASIVELNKVRVAPGKLTAMLRARWGLNKILSDGNLKNRSDHRHHAIDAAVLGVIDQRLVQLVAQAAARAEANELERLFDGLPDPFDGLAAMSFGDQVREKIRGITVSHRAEHGWQGRMHNDTAYGPVEAVNGVHTVVTRKPLSGLTAKEFPNIRDRVLAKALEDHVAAEAAAGRGFGDALGSFEWGGQPVRRVRMLDVLGNPIPIQDPSGTVFKVYKGDSNAWYEILRDPRGRWTGKIVSTFEAYRLHREWLAETGGDSGRGGGVFLDWAAKRVAGEAGTPLFRLFKGDLLALGEAPDRRIVRVVKFSEGQVALALHLEAGNLKARDADKGDPFKYQYCSPDSLRKQAARPAGVDLLGYVHDKGPLE

SEQ ID NO: 11 - protein, 1353 aa, unidentified
  REGION 1..1353: note = LPG10195
MRKNQEPYNIGLDIGTSSIGWSIMNDNFDLMRVKGKKGIGVRLYNEGQSAAERRMHRTARRRYGRRKWRLRLLEDFFDEHMAEVDDTFFARLKDSSISPKDDKKYRKSLLFPKSKGLTYQDDGEFYKKYPTMYHLRYALMTEHRKFDLREIYLAFHHMVKYRGNFLYDTSVDSFEAKNLDIKGKFDEINDLLSSYTDFYVDNSNAALVESILLEKNTTRKDKAKKIAKLLHVEDKEKVKNKKAKDLATQISNAVLGLKCNFHLIFELQQKYSFDLCSEKTEENIANLSEVLDENQKMLLMILKEIQDQVMLNAFVPSGMSLSEAMMQKYDAYGEQLKIYHELEHSVSDDSAAELRGAYCDYNDNIAKRDEFYNKLKKILSDMDKENVEQDVLESCGKLKKLIDENKLFIRQRTAANGVLPHQLHQIEMRKIIDNQKEYYPWLAEPNPNEKRRVYSKYKVEELIAFRIPYYVGPLVDPNNADKNKEARFSWMVRKKDGEITPWNFDDKVDRAESANNFIKRMKSKDTYLLGEDVVPKESMLYQKYEVLNELNNLRINDSGLSDSFEDVKLKQAIYNDLFKKQKIVKITDLQNYLVQNHKYLVKPKISGLADENRFLSSLSTYSDLKTIFGDKVDDRTYFNDFEKMVEYSTVFEDGHVYKQKLDEFTWLTKEEKDKIGKKRYRGWGKLSKKLLTGLRDKNNHTIMDNLWETNRNFMQIQTADEFPKQISEENERHLKGSVSDAINDMYTSPANKKAIRQVLRVVDDIQKAMGYAPSSISLEFAREDGPSVRTVSRANRMKSIYEKYASEVSEEVMKDLDGVIKDKKGLNDRLYLYFEQQGKDMYSGHPLDFDKVISGQEYDIDHILPQAVIKDDSLDNRVLTTKALNNDVKSKGVPCRMFNGMHSFWKNLYDKGFISRRKFNNLTTNPENIDKYKMKGFVNRQLVETRQIIKLVANVLNDKYQNDDVDIIEVRAELTHDVRKHFKFYKNRNVNDYHHAFDAYLTNFVGQYLFKKYPNLRPLFDYNDFMKVSDNVFKQLRGNNFLGEFLNKTGDIISTDGNFVLNKEEMINKLNKAYAFKKILVTKEVVQRTGAMFDETVYSAKSGKTLIKLKKDRDTSIYGGHSGNKDAYMVIVYTGKGYKVIGIPVRYAERLDSLRKNDVDGFNDMLNRLIESKFSKKSKNKQFRIVIDKVLYNQLIQDGNLLFTLGSAAYQHNFRQLFLDKKALEILDKVATPKPTDDDLIMVYDQILERVDKYFELYDNGGCREALHKGRELFCKLPVSKRNEKDVTKRDMIYTILDGLHANGKTVSCLEIGKGGAFGKFQKQNGINLSENAKLIYQSPTGLFERVVYLKDL

SEQ ID NO: 12 - protein, 1151 aa, unidentified
  REGION 1..1151: note = LPG10196
MQIDAHQSCDMQNDKPYVIGFDLGDFSVGMSAIQIDSEGLPTRILNSQSVIHDSGIDPSQRKYGTSRKKEAGIARRIRRMRRYRKHRLNKLSQILSTNGYKRMNIRQFHGPDIWLIRASAADQYIADEDARRTAIRVSCEHIARHRGWRNPYQNPRVLLHAQPDSATYEQLRENAADHMGGVMPADNETPAQIVRDVLDYHRGEPAIRLRHTGKVTRKTKKNQHTPCAWVLPERMMQSDNAYELRRILETQQVPEPLIEQLILAVFYQISPKGSAEHLAGKDAIDPTRVRAPKCSLAFQRYRIADVISNLRVGIEQRRLTVEEKQAIARLLASDNKQTCEYETWAAVAETLGHPATWLKGIGEPAPDGEGNVTNRPPHIDILHRISQLDDNTLRVTLLNWWDSHTTEDKESFIRVLSNTVNIETVADDPAYKAALQLLDGLDDTQLNKLDAMNLESGRAAYSENTLNKLADWMLTHEGDVTDAREQVFHIARDWRPPQEPVGAPLGNPPVDRSLKIAARWLDAIEQRYGKPISVQVEHTRKAFTSVETRMKNQKEWQDSSRCKARQALREQLAKQGGSISENSLMRREAITRQNGECLYCGASIDITTCQMDHIVPRKGSGCTNTKDNLVAVCPTCNQEKSNMPFPAYCATESARMRGVSMKDAIHRVHHLNLDDQGYKSKAQKALKDGIIRRLKQTEADDPIDGRSLESTSWMAVELYKRLTWRYAHNGGTPVTVNVYRGELTAEARSIMRHAAGMDFHMIGGHGKTRLDRRHHAIDASVIAMMTPAAAQAIAARISMHEAETLTGMRTDWRTYPANPTAKYQHWLESMRRLMNLLNTALDDDRIRVLRNQRYRLGSSAAHKDTITPLTYRELGDPLDASLIRHASTPALYTALTHLPDYNDADGLPANPERRINVNGTIIDSDDTIAFFTGDAAQILVNDGGAAVGSSIHHARVYRYYTLLKSGKRKYAYGWIRVYQQDLIHAHGDLFTEPLTACTLSLRYADQTLVSAIRDGRAEYLGHLLAGDEIVVDFTDGKGAVGKFNEFFAKDIREQPSAMRRWTVTGFPTLVQTSLRPCYLSGEGLAKLEERGGEPVPKEVEKILAGSGGYTPSVNTVFSLHPAIIHRNVFGEERWGTVSGLPTSWRVNDTQK

SEQ ID NO: 13 - protein, 1382 aa, unidentified
  REGION 1..1382: note = LPG10197
MIKKDYNLGLDIGATSVGFAGIDEQYDPIKLKGKTVVGVNLFEEGKTAADRRGFRTTRRRLSRRKWRLSLLEEFFDPYITPVDPTFFARLKESNLSPKDNNKNFSGSLLFSDITDQKFYEEYPTIYHLRYALMTENKKFDLRAIFLAIHHMIKYRGNFLNSTPVAHFDTSKINFASDLNELNSLYLNEDPNNIFEINLQNVKEISDILLDHSIKKFDKQKQVAKLLLTSQNDKELDKINKQIATQISKAILGYNFSLNEILKIEVEDKSKWKLNFSSADIDDKLPDLISELDESQESILNIILSLYSRLTLNGIVPSGMSLSEAMIDKYGTHKEHLDLLKKYLKTLPIKNRKEIAEAYAEYVGNSLKKSGHISQEEFYKAVKKNLDKSETAQAILGLISEEKFMPKQRTNQNGVIPYQLHQKELDQIIVNQSQYYPWLAELNPVTEHKDAKYKLDELIAFRVPYYVGPLIDPKTTPQTEQGNKNASFAWMVRKENGQITPWNFDKKVDRISSANNFIKRMTTKDTYLIGEDVLPAHSLIYERFKVLNELNMIRVNGKKLSVSVKQNLYNDLFKQQKTINRKKLANYLQANLGIPERPQITGLSDPEKFNSQLSSYIDLQKILGSEIVDDPNKQDDLEKIIEWSTVFEDSRIYKVKLQEIGWLTEKQKNELVSHRYQGWGRLSRKLLVELKDKNGRSILDILWNSQRTFMEIQSRPEFAEQITNENQDKLTEDNYEDVLEDAYTSPQNKKAIRQVIKVVDDIVKAAGKAPKFISLEFARSDERSDRVKSRKTQIQKIYETTAKELLKDDQLIKELGSVSDLSDRLYLYFTQLGRDMYTGKPINIDEISTMYDIDHILPQAFLKDDSLDNRVLVRRQDNNAKSDTVPALKFGKMKPFWNKLQKHGLISKRKLNNLQTNPESIDKFKAVSFVNRQLVETRQVIKLAANILASRYPDSKIIEVKASLTHQMRESFNLIKNRDVNDYHHAVDAYLSAFVGQYLYNRYPKLQPYFVYGQFKKFDKQSTRIGMKTNHFNFLYDLEPEGKNVKIKKPTKIINKETGEIIGDRDELVAKLNRVYNFKYMLISQEVYTRSGALFDQTIYPANSGKKLIPLKQNKTTAIYGGYSGSKAAYMSIIRLRDKKGGTYRIVGIPVRAVNKLNQAKKKSNEKYLAELKAVIEPQIAKTKKDRKTGQRVLVPQEFDVIIPEVMYRQLIVDGDQKFTLGSSTYQYNARQLVLDSESLVTLSKNFIESNSVTSEIKNNRLIKVYDDILDKVNKYFSLYDKNKFRQRLNEGREKFIRLPIDSKFKNNKKIAVGKREILQNILIGLHDNAGMGNLKVLGINTPFGMIQTSNGITLSPNACLIYQSPTGLFERKVYLNTISSLK

SEQ ID NO: 14 - protein, 1092 aa, unidentified
  REGION 1..1092: note = LPG10198
MAYTMGIDVGIASCGWAIVDLERQRIIDLGVRIFEKAENPKNGEALAVPRREARSSRRRLRRKKHRIERLKYMFIRNGLAVDIQHLEQTLRSQNEIDVWQLRVDGLDRVLTQKEWLRVLIHLAQRRGFQSNRKTDGSNEDGQVLVNVTENEKLMEEKDYRTVAEMMVKDGKFSDHKRNKNGNYHGVVSRASLLVEIHTLFESQRQHHNFFASKDFELEYVNIWSSQRPVATKDQIEKMIGTCTFLPKEKRAPKASWHFQYFMLLQTINHIRITNVQVTRSLNKEEIEQVVNMALTKSKVSYHDIRKILDLSEEYQFVGLDYGKDDEKKKVESKETIIKLDDYHKLNKIFNEVELAKGEAWEAVDYDTVAYALTFFKDDEDIRDYLQNKYKDSKNRLVKNLSNKEYTNELIEKVSTLSFRKVGHLSLKALRKIIPFLEQSMTYDKACQAAGFNFQGISKKKRSVILPVIDQISNPVVNRALTQTRKVINALIKKYGSPETIHIETARELSKTFDERKNITKDYKENRDKNERAKKHLSELGIINPTGLDIVKYKLWSEQQGRCIYSNQPISFERLKESGYTEVDHIIPYSRSMNDSYNNRVLVMTRENREKSNQTPYEYMGNDTQRWHEFEQRVTTNLQIKKEKRQNLLLKGFTNRRELEMLERNLNDTRYITKYLSHFISTNLEFSPSDKKKKVVNTSGRITSHLRSRWGLEKNREQNDLHHAMDAVVIAVTSDSFIQQVTNYYKRKERRELNGDDKFPLPWKFFREEVIARLSPNPKEQIEALPNHFYSEDELADLQPIFVSRMPKRSITGEAHQAQFRRVVGKTKEGKNITAKKTALVDISYDKNGDFNMYGKETDPATYEAIKERYLEFGGNAKKAFSTDLHKPKKDGTKGPLIKSVRIMENKTLVHPVNKGKGVVYNSSIVRTDVFQRKEKYYLLPVYVTDVTKGKLPNKVIVAKKGYDDWIEVDDSFTFLFSLYPNDIIFIRQNPKKKISLKKRIESHSISDSKEVQEIHAYYKGVDSSTAAIEFITHDGSYYAKGVGVQNLDCFEKYQVDILGNYFKVKGEKRLELETSDSNHKGKDVNSIKSTSR

SEQ ID NO: 15 - protein, 1086 aa, unidentified
  REGION 1..1086: note = LPG10200
MPFRQPVSYAFDMGTNSIGWCVFRLSAAGHPVAIADAGVRIYSDGRDPQSKTSLAVARREAKAAARRRDRTKRRQKATLRTLAEYGLMPGGKDERERLLRETADSADRNAPANDPLNLRARALTEKLPLHHIGRALFHLGQRRGFKSNRKTDRRDNDKGKIAIGIDRLRDAIREAKAETLGVFLASRRAQGLHVRLRAGSSVILDDGYDFYPVRSLLEEEFRHIWDAQAVHYPDVLTEARGEHLFKVIFHQRPLKKPRIGSCTFNPLEQRLAKAHPLFQAFRLYKEVNELEVVAPDLSQRKLTLDERDALVLKLRGAKTAKYKTLRKDLKLTPDMRFNKESENRVDMAGDEVTAALSAKGLFGPRWNTLSMDSQWKVIERIQEEENPFVLHQWLVETHGLSDDAAEAVAACHLPEGYGRLGHTALSTMLEELRADVIPEAKAAERAGYNHSYFGTGEIFDELPKYQEVVARSIPPGTGDLEDEYDVRKGRITNPTVHIGLNQLQRLVNGLIRRFGKPAEIAVELARDLKTNEKKKTEINRRIGENTRAARQRSEKIAELRKDTPALVDNGYNRLLLKLWEELNPAKPEDRCCIYTGKPISISMLFSGAVDVDHILPYSRTLDDGQGNKLLCLKEANRVKRNRAPSEVTEWANHYDEILERANRLPKPKRWRFARDVMADFDADSGFLDRQLTDTQYLSRLAREYLCSLYPEKHEQWRVRVIPGRMTEMLRRHWGLNTLLPDHNYSDAKNRNDHRHHAIDAAVVGVTTRSMLQRISTEAARREEQELEDVVKGIPVPWEHFRDDLQQALNNIVVSHKPDHGTVGLDDKGKWQTAGKLHNDTAYGLTGEVDARGNTIVVRRKMLLSLTDKDIPAIRDDELRARLYSAAGGLSGKELQQALLDFARNDPKYRGIRRVRVTETLAVIPIRDKDGNVYKGYKGDANYRYDVWEMKDGKWQAEVISMFDAHQKGWESPVRKANPTARKVLSLQQNDMVAYEHPSDGYTIARVVKFASSGQIVFARNNEGGSLKARDANRDDPFKYFSKTANGLREIKARQIRIDETGRVYDPGPRDRESRMIGNQKLKTIAI

SEQ ID NO: 16 - protein, 1076 aa, unidentified
  REGION 1..1076: note = LPG10203
MKYSIGLDIGIASVGWAVINEDLGRIENMGVRIFDAAEHPKDGSSLSTPRREARSARKRLRRRRHRVERTRYFMIQKGLLTQVQMEQLYDWKHGDLDIWLIRVNALERKLTNREFARVLIHHTKNRGFKSNRKSELKEGDNGVVLSAVQENKRLMEEKGYQTIAEMLLLDTKFKGLKRNKGGDYSHVVARSELEHEIRLVFAKQREFGHRFASVENEEGYIAIWSSQRPFATKDDISKKIGYCTLEPKERRAPKSTYTFERFRALDKLARLRILSSTKENRALTDDERELILNSLFSKKEMKYKELRKLLKLQDTDRFNEIFYDPEATADKNENRTFLSLESQYKIRSIIQQVEGKKINDSYRPIDFDTIAYALTVFKDDQDIRDYLLNDYVESNGKRTTNLANRVYKEEVIEELLQLSFAKFGHLSLKALKNILVHMEQGLPYYKACEEAGYQFNSNQNKDKQRILPVIPAKEIANPVVVRSLSQVRKVVNGIIKKYNIPSAMYIELARDMGRVYKERRDIEKQYDKNRQINEAAKERIIEYSEGRFTPKAHDILKYKLWQEQGGRCAYSFAPIPIESLFNIGYVEVDHIIPYSRSFDDSNNNKVLVLSAENQNKRNQTPFEYFGHDVVKWEQFKSFVTTLKVAKRKKMLLLKQNFDEQQAEEFRSRNLNDTRYITRFIKNFIEDNLQFREEEGNKQHVFTLNGAYTSLMRKRWGFNKNRRENDLHHALDAVLIAVSWPFKHQVSAYFNRREEYARNQLKREGEYFPEPWPGFIHELEIRMMQDEDKMKLALESLDLKTYDDDFINRVKPIFVSRMPKRSIKGQIHEATLKRVRGNTEDGYIRTVKKVRLDQIPFEKNGNFPMYGKETDLKTYSAIKKRFLEYGDRKKAFATPLYKPAKDPSKAPIIRSVKIEEKANRVVHLDEKTVADNASIAKTEVFRHRKTGQYYLTPIYVADVVNGIIPDRLISTKKPYSEWRRITDEYEFLFSLYPNDLIRIKMPKEKETKNFMKETHIWQEGFMYYRGVHSGSAGVRMINHMNSFEDEIGVQKLELFEKYQVDPLGGITKVHGEKRYGI

SEQ ID NO: 17 - protein, 1077 aa, unidentified
  REGION 1..1077: note = LPG10204
MKYSIGLDIGIASVGWAVINEEVNRIENLGVRIFDVAENPKDGSSLATPRREARSARKRLRRRRHRIERTRQFIVKQGLLTQVQMEQLYDWKSEDLDIWLIRVNAIERKLMDREFARILIHMVKNRGFKSNRKSELKEGDNGVVLSAVQENKQLMEEKGYQTIAEMLLFDERFEGRKRNKGGAYSHVVSRSELESEIRLIFQKQREYGHHFARVENEEVFINIWASQRPFATKDDIAKKIGTCTFEENEKRVPKSTYTFERFRAFDKLNRLRIVSTVAPTRALTEEEKSLILDSLFSKKEVKYKELRKLLKLQDEQRFNELYYDPNETNDKNENRTFLSLESQYKIRKVIQQVEGKNINDSYRPVDLDTIAYALTTFKDDHDIRDYLQNRYVSSHGKKTENLANRVYKEELIEELLQLSFSKYGHLSLKALKNILPHMEKGIPYHKACEQAGYQFSKKADKDKEYFSPVIQAKDIANPVVVRSLSQVRKVINGIIKKYGSPSAIYIELAREMGRVYKERKEIEKQYNKNRDINEGAKQHILELHPEFGHPRGHDILKYKLWKEQDGRCAYSFEPISMERLFHIGYAEVDHVIPYSRGFDDSNSNKVLVLAAENQNKQNRTPHEWFGHDETRWQQFVSFVTTMKVSKKKKGLLLKRNLDEEQAEEFRSRHLNDTRYITRYIKSFIEDNLQFRLEEGKKQYVHTVNGAYTSLMRKRWGFNKNRQENDLHHALDAVIIAVSLPFKHRVSAYFKRREEYAHNQLKREREFFPEPWPGFVHELEIRMMQNAEKMKLGLESLDLKTYDESFLREVQPIFVSRMPKRSIKGQIHEATLKRVRGNTEDGYIRTVKKVRLDQIPFDKNGDFPMFGKETDMKTYEAIKNRYLEYKKDKKKAFLEPLYKPAKNPENAPIIRSVKIEDKANRVVMLDDKTAADNASIVKTEVFRHRETGKFFLTPIYVSDVLSNRIPEKFITPGKPYSQWKDITDEYEYLFALYPNDLIRVKMPKEKETKTNIGEKHVWQENFMYFKGVHSADAGIKLIDHMNSFEDKIGTQRLVAFEKYQVDPLGELTKVHGEKRHGI

SEQ ID NO: 18 - protein, 1077 aa, unidentified
  REGION 1..1077: note = LPG10205
MKYSIGLDIGIASVGWAVINEEIDRIENLGVRIFDAAENPKDGSSLATPRREARSTRKRLRRRRHRIERARQFIVQQGLLTQVQMEQLYDWKSEDLDIWLIRVNAIERKLMDREFARILIHMVKNRGFKSNRKSELKEGDNGVVLSAVQENKQLMEEKEYQTIAEMLLFDEKFEGRKRNKGGAYSHVVSRSELESEIRLIFQKQREYGHHFAREENEEAFINIWASQRPFATKDDIAKKIGTCTFEENEKRVPKSTYTFERFRAFDKLNRLRIVSTVAPTRALTEEEKSLILDSLFSKKEVKYKELRKLLKLQDEQRFNELYYDPNETNDKNENRTFLSLESQYKIRKVIQQVEGKNINDSYRPVDLDTIAYALTTFKDDHDIRDYLQNRYVSSHGKKTENLANRVYKEELIEELLQLSFSKYGHLSLKALKNILPHMEKGIPYHKACEEAGYQFSKKADKDKEYFLPVIQAKDIANPVVVRSLSQVRKVINGIIKKYGSPSAIYIELAREMGRVYKERKEIEKQYNKNRDINEGAKQHILELHPEFGHPRGHDILKYKLWKEQDGRCAYSFEPISMERLFHIGYAEVDHVIPYSRGFDDSNSNKVLVLAAENQNKQNRTPHEWFGHDETRWQQFVSFVTTMKVSKKKKGLLLKRNLDEEQAEEFRSRHLNDTRYITRYIKSFIEDNLQFRLEEGKKQYVHTVNGAYTSLMRKRWGFNKNRQENDLHHALDAVIIAVSLPFKHRVSAYFKRREEYAHNQLKREREFFPEPWPGFVHELEIRMMQNAEKMKLGLESLDLKTYDESFLREVQPIFVSRMPKRSIKGQIHEATLKRVRGNTEDGYIRTVKKVRLDQIPFDKNGDFPMFGKETDMKTYEAIKNRYLEYKKDKKKAFLEPLYKPAKNPENAPIIRSVKIEDKANRVVMLDDKTAADNASIVKTEVFRHRETGKFFLTPIYVSDVLSNRIPEKFITPGKPYSQWKDITDEYEYLFALYPNDLIRVKMPKEKETKTNIGEKHVWQENFMYFKGVHSADAGIKLIDHMNSFEDKIGTQRLVAFEKYQVDPLGELTKVHGEKRHGI

SEQ ID NO: 19 - protein, 1071 aa, unidentified
  REGION 1..1071: note = LPG10207
MKKLDYRIGLDIGTNSIGWGIIELSWNRDKEQYEKVRIVDKGIRMFDKAEIPKTGASLAEPRRIARSSRRRLNRKSQRKKDIRNLLIQHEVINQKELDSLYPLSKKSIDIWDIRLDGLDRLLNRLEWARLLIHLAQRRGFKSNRKSELKDEETGKVLSSIQANEKRLSLYRTVGEMWMKDADFSKYDKRRNSPNEYVFSVNRVDLEKEIVTLFEAQRNFQSSYASVDLQETYLQIWAHQLPFASGNAILNKVGYCSLLKGKEKRIPKATYTFQYFSALDQINRTRLGPEFQRVTTEQRNLILDKVFQRTDYYKKKTIPEVTYYDIRKWLALDETIQFKGLIYDPNEELKKIEKKPFINLKPFYEIKKIVANYTEKTNEAFSTLDYDTVAYALTVYKTDKDIRSYLKSPHNLSKRCYDDQLIEELLSLSYTKFGHLSLKAINYVLPIMQEGRTYKEAADQLGFDTTHLKKEKRSKFLPPISDEITNPIVKRALTQARKVVNAIIRRYGSPHSVHIELARELSKSREERNKIKAAQDENYKKNKGAISILSEHGILDPTGYDIVRYKLWKEQGERCAYSLKTIPPDTFFNELRKERNGSPILEVDHILPYSQSFIDSYDNKVLVYSDENRKKGNQIPYFYFLETNKDWDSFEKYVRSNKLFSKKKSGYLLKKAYLPRESELIKERHLNDTRYASSFLKNFIEQNLQFKEIEGNPRKKHVQTVNGIITAHLRKRWGLEKDRQETYLHHAMDAIIVACTDHHMVTKVTEYYQTKESNKSVKKPYFPLPWEGFRDELLSHLASQPIAKKISEELKAGFQPSNYILVSRMPKRSITGAAHDQTIMKKGGIDKKGKTIIIKRLQLKDIKFDENGDFKMVGKEQDIATYEAIRQRYLKHGKNSKKAFETPLYKPSKKGKGNLITKVKVEVQTKSFVREVNGGVAQNGDLIRIDLFEKDYKYYMVPIYVLDTVCSELPNKVVTSSKGYEQWLTLDNSFMFKFSLYPYDLVRLIKGDEDRFLYFSTLDIDSDRLIFKDVNKPSKKNEYRYSLKTIEDLEKYDVGVLGDLSLVRQEVRRKFQ

SEQ ID NO: 20 - protein, 1077 aa, unidentified
  REGION 1..1077: note = LPG10208
MKYSIGLDIGIASVGWAVINEEVNRIENLGVRIFDVAENPKDGSSLATPRREARSARKRLRRRRHRIERTRQFIVKQGLLTQVQMEQLYDWKSEDLDIWLIRVNAIERKLMDREFARILIHMVKNRGFKSNRKSELKEGDNGVVLSAVQENKQLMEEKGYQTIAEMLLFDERFEGRKRNKGGAYSHVVSRSELESEIRLIFQKQREYGHHFARVENEEVFINIWASQRPFATKDDIAKKIGTCTFEENEKRVPKSTYTFERFRAFDKLNRLRIVSTVAPTRALTEEEKSLILDSLFSKKEVKYKELRKLLKLQDEQRFNELYYDPNETNDKNENRTFLSLESQYKIRKVIQQVEGKNINDSYRPVDLDTIAYALTTFKDDHDIRDYLQNRYVSSHGKKTENLANRVYKEELIEELLQLSFSKYGHLSLKALKNILPHMEKGIPYHKACEEAGYQFSKKADKDKEYFLPVIQAKDIANPVVVRSLSQVRKVINGIIKKYGSPSAIYIELAREMGRVYKERKEIEKQYNKNRDINEGAKQHILELHPEFGHPRGHDILKYKLWKEQDGRCAYSFEPISMERLFHIGYAEVDHVIPYSRGFDDSNSNKVLVLAAENQNKQNRTPHEWFGHDETRWQQFVSFVTTMKVSKKKKGLLLKRNLDEEQAEEFRSRHLNDTRYITRYIKSFIEDNLQFRLEEGKKQYVHTVNGAYTSLMRKRWGFNKNRQENDLHHALDAVIIAVSLPFKHRVSAYFKRREEYAHNQLKREREFFPEPWPGFVHELEIRMMQNAEKMKLGLESLDLKTYDESFLREVQPIFVSRMPKRSIKGQIHEATLKRVRGNTEDGYIRTVKKVRLDQIPFDKNGDFPMFGKETDMKTYEAIKNRYLEYKKDKKKAFLEPLYKPAKNPENAPIIRSVKIEDKANRVVMLDDKTAADNASIVKTEVFRHRETGKFFLTPIYVSDVLSNRIPEKFITPGKPYSQWKDITDEYEYLFALYPNDLIRVKMPKEKETKTNIGEKHVWQENFMYFKGVHSADAGIKLIDHMNSFEDKIGTQRLVAFEKYQVDPLGELTKVHGEKRHGI

SEQ ID NO: 21 - RNA, 23 nt, Bacillus sp.
  source 1..23: mol_type = other RNA; note = Bacillus cytotoxicus
  misc_feature 1..23: note = LPG10165 crRNA
gtcatagttccattaaagccatt

SEQ ID NO: 22 - RNA, 20 nt, Nitrobacter winogradskyi
  source 1..20: mol_type = other RNA
  misc_feature 1..20: note = LPG10166 crRNA
gttgcggttggccctcaatc

SEQ ID NO: 23 - RNA, 23 nt, Bacillus sp.
  source 1..23: mol_type = other RNA; note = Bacillus toyonensis
  misc_feature 1..23: note = LPG10167 crRNA
gtcatagttccattaaagccatt

SEQ ID NO: 24 - RNA, 23 nt, Bacillus sp.
  source 1..23: mol_type = other RNA; note = Bacillus toyonensis
  misc_feature 1..23: note = LPG10168 crRNA
gtcatagttccattaaagccatt

SEQ ID NO: 25 - RNA, 17 nt, Staphylococcus sp.
  source 1..17: mol_type = other RNA; note = Staphylococcus_A sciuri
  misc_feature 1..17: note = LPG10169 crRNA
gttttagtactctgtaa

SEQ ID NO: 26 - RNA, 20 nt, Bacillus sp.
  source 1..20: mol_type = other RNA; note = Bacillus mosaicus
  misc_feature 1..20: note = LPG10171 crRNA
gctatagttccataagaaac

SEQ ID NO: 27 - RNA, 22 nt, unidentified
  source 1..22: mol_type = other RNA
  misc_feature 1..22: note = LPG10186 crRNA
gttttagtgtcatgttgaatag

SEQ ID NO: 28 - RNA, 13 nt, unidentified
  source 1..13: mol_type = other RNA
  misc_feature 1..13: note = LPG10190 crRNA
gccataattcctc

SEQ ID NO: 29 - RNA, 18 nt, unidentified
  source 1..18: mol_type = other RNA
  misc_feature 1..18: note = LPG10191 crRNA
gtttcggcactctctcag

SEQ ID NO: 30 - RNA, 13 nt, unidentified
  source 1..13: mol_type = other RNA
  misc_feature 1..13: note = LPG10194 crRNA
gttgcggctggac

SEQ ID NO: 31 - RNA, 16 nt, unidentified
  source 1..16: mol_type = other RNA
  misc_feature 1..16: note = LPG10195 crRNA
gtttcagctggatgtc

SEQ ID NO: 32 - RNA, 15 nt, unidentified
  source 1..15: mol_type = other RNA
  misc_feature 1..15: note = LPG10196 crRNA
gttggaaatctatcc

SEQ ID NO: 33 - RNA, 16 nt, unidentified
  source 1..16: mol_type = other RNA
  misc_feature 1..16: note = LPG10197 crRNA
gttatagatgtacttc

SEQ ID NO: 34 - RNA, 16 nt, unidentified
  source 1..16: mol_type = other RNA
  misc_feature 1..16: note = LPG10198 crRNA
gctatagttccttacc

SEQ ID NO: 35 - RNA, 17 nt, unidentified
  source 1..17: mol_type = other RNA
  misc_feature 1..17: note = LPG10200 crRNA
gttgcggctggaccacg

SEQ ID NO: 36 - RNA, 14 nt, unidentified
  source 1..14: mol_type = other RNA
  misc_feature 1..14: note = LPG10203 crRNA
gccataattcctcc

SEQ ID NO: 37 - RNA, 14 nt, unidentified
  source 1..14: mol_type = other RNA
  misc_feature 1..14: note = LPG10204 crRNA
gccataattcctcc

SEQ ID NO: 38 - RNA, 14 nt, unidentified
  source 1..14: mol_type = other RNA
  misc_feature 1..14: note = LPG10205 crRNA
gccataattcctcc

SEQ ID NO: 39 - RNA, 14 nt, unidentified
  source 1..14: mol_type = other RNA
  misc_feature 1..14: note = LPG10205 crRNA2
gccataattcctcc

SEQ ID NO: 40 - RNA, 19 nt, unidentified
  source 1..19: mol_type = other RNA
  misc_feature 1..19: note = LPG10207 crRNA
gtcatagttccattaaagc

SEQ ID NO: 41 - RNA, 14 nt, unidentified
  source 1..14: mol_type = other RNA
  misc_feature 1..14: note = LPG10208 crRNA
gccataattcctcc

SEQ ID NO: 42 - RNA, 112 nt, Bacillus sp.
  source 1..112: mol_type = other RNA; note = Bacillus cytotoxicus
  misc_feature 1..112: note = LPG10165 tracrRNA
agatttatagagttattatggtaaggcattatgccgtggcgttggggatcgcctaactccgatttttatcggatttccctaaaaatgactaactttgtttagtcattttttt

SEQ ID NO: 43 - RNA, 83 nt, Nitrobacter winogradskyi
  source 1..83: mol_type = other RNA
  misc_feature 1..83: note = LPG10166 tracrRNA
gagggcctcccgttaacaagcttatgcacaaaatggggcaccctgcggggtgccccttccatttgtgagcgcgactggttttt

SEQ ID NO: 44 - RNA, 87 nt, Bacillus sp.
  source 1..87: mol_type = other RNA; note = Bacillus toyonensis
  misc_feature 1..87: note = LPG10167 tracrRNA
aatggctttgatgtttctatgataagggtttcggcccgtggcgttggggatcgcctgcccatttcaatgggcttctccccatttatt

SEQ ID NO: 45 - RNA, 87 nt, Bacillus sp.; identical to SEQ ID NO: 44
  source 1..87: mol_type = other RNA; note = Bacillus toyonensis
  misc_feature 1..87: note = LPG10168 tracrRNA

SEQ ID NO: 46 - RNA, 68 nt, Staphylococcus sp.
  source 1..68: mol_type = other RNA; note = Staphylococcus_A sciuri
  misc_feature 1..68: note = LPG10169 tracrRNA
ttacagaatctactaaaacaaggcaaaatgccgtgtttatctcgtcaacttgttggcgagattttttt

SEQ ID NO: 47 - RNA, 115 nt, Bacillus sp.
  source 1..115: mol_type = other RNA; note = Bacillus mosaicus
  misc_feature 1..115: note = LPG10171 tracrRNA
gtttcttacgttactatagtaagggcaatgacccgtggcgtttggggatcgcctcatccattacggatattctccccatgtgaaaagcacctaagcataaggctaaggtgctttt

SEQ ID NO: 48 - RNA, 70 nt, unidentified
  source 1..70: mol_type = other RNA
  misc_feature 1..70: note = LPG10186 tracrRNA
ctattcaacatggcaagttaaaataagctttatgcgtattcaaacttttgttaaggcgacatcgcctttt

SEQ ID NO: 49 - RNA, 57 nt, unidentified
  source 1..57: mol_type = other RNA
  misc_feature 1..57: note = LPG10190 tracrRNA
gagttattatggtaaggcattatgccgtggcgttggggatcgcctaactccgatttt

SEQ ID NO: 50 - RNA, 63 nt, unidentified
  source 1..63: mol_type = other RNA
  misc_feature 1..63: note = LPG10191 tracrRNA
ctgagagaacctgccgaaacaagagttcatctcgaaatcagtcccacttcgtgtggggctttt

SEQ ID NO: 51 - RNA, 77 nt, unidentified
  source 1..77: mol_type = other RNA
  misc_feature 1..77: note = LPG10194 tracrRNA
gtccttccgttaacacgctcgggaacgcaagttccttgcagcacaagatgtgcggcgggcctcggcccgccgcgttt

SEQ ID NO: 52 - RNA, 79 nt, unidentified
  source 1..79: mol_type = other RNA
  misc_feature 1..79: note = LPG10195 tracrRNA
gacatccagaagttgaaatcaagcaagacttaaagtcaagcttctacctttgatccacgctttgtggacagtacatatt

SEQ ID NO: 53 - RNA, 99 nt, unidentified
  source 1..99: mol_type = other RNA
  misc_feature 1..99: note = LPG10196 tracrRNA
gatagattcccaataaggcgcagcgggatttagctgcactggttgctcacgacatcaacatgtcgtaggggaggctccttcacggggcctccccgtttt

SEQ ID NO: 54 - RNA, 75 nt, unidentified
  source 1..75: mol_type = other RNA
  misc_feature 1..75: note = LPG10197 tracrRNA
gaagtacagagttataatcaaacaagtgcttcggcacaagtttctacttatgagtcagttatctgaccattacat

SEQ ID NO: 55 - RNA, 59 nt, unidentified
  source 1..59: mol_type = other RNA
  misc_feature 1..59: note = LPG10198 tracrRNA
ggtaagttgctgtagtaagggcaacagacccgaggcgttggggatcgcctagcccgttt

SEQ ID NO: 56 - RNA, 64 nt, unidentified
  source 1..64: mol_type = other RNA
  misc_feature 1..64: note = LPG10200 tracrRNA
cgtggtctggccgttaacaagccaagacggcaccagataaggcgctcgctccggcgggcgcttt

SEQ ID NO: 57 - RNA, 105 nt, unidentified
  source 1..105: mol_type = other RNA
  misc_feature 1..105: note = LPG10203 tracrRNA
ggagttattatggtaaggcattatgccgcggcgttgggaatcgcctatattcgattaatatcgaatcttcccacaaaatgactaacttagtttagtcattttttt

SEQ ID NO: 58 - RNA, 104 nt, unidentified
  source 1..104: mol_type = other RNA
  misc_feature 1..104: note = LPG10204 tracrRNA
ggagttattatggtaaggcattatgccgtggcgttggggatcgcctacatccgattagatcggattctccctaaaaatgactaactttgtttagtcattttttt

SEQ ID NO: 59 - RNA, 104 nt, unidentified
  source 1..104: mol_type = other RNA
  misc_feature 1..104: note = LPG10205 tracrRNA
ggagttattatggtaaggcattatgccgtggcgttggggatcgcctacatccgattatatcggattctccctaaaaatgactaactttgtttagtcattttttt

SEQ ID NO: 60 - RNA, 68 nt, unidentified
  source 1..68: mol_type = other RNA
  misc_feature 1..68: note = LPG10205 tracrRNA2
ggagttattatggtaaggcattatgccgtggcgttggggatcgcctacatccgattatatcggattct

SEQ ID NO: 61 - RNA, 84 nt, unidentified
  source 1..84: mol_type = other RNA
  misc_feature 1..84: note = LPG10207 tracrRNA
gctttgatgtttctatgataagggtttcggcccgtggcgtcggggatcgcctgcccattttgatgggcttctccccatctattt

SEQ ID NO: 62 - RNA, 104 nt, unidentified; identical to SEQ ID NO: 58
  source 1..104: mol_type = other RNA
  misc_feature 1..104: note = LPG10208 tracrRNA

SEQ ID NO: 63 - RNA, 139 nt, synthetic construct
  source 1..139: mol_type = other RNA
  misc_feature 1..139: note = LPG10165 sgRNA backbone
gtcatagttccattaaagccattaaagagatttatagagttattatggtaaggcattatgccgtggcgttggggatcgcctaactccgatttttatcggatttccctaaaaatgactaactttgtttagtcattttttt

SEQ ID NO: 64 - RNA, 107 nt, synthetic construct
  source 1..107: mol_type = other RNA
  misc_feature 1..107: note = LPG10166 sgRNA backbone
gttgcggttggccctcaatcaaaggagggcctcccgttaacaagcttatgcacaaaatggggcaccctgcggggtgccccttccatttgtgagcgcgactggttttt

SEQ ID NO: 65 - RNA, 114 nt, synthetic construct
  source 1..114: mol_type = other RNA
  misc_feature 1..114: note = LPG10167 sgRNA backbone
gtcatagttccattaaagccattaaagaatggctttgatgtttctatgataagggtttcggcccgtggcgttggggatcgcctgcccatttcaatgggcttctccccatttatt

SEQ ID NO: 66 - RNA, 114 nt, synthetic construct; identical to SEQ ID NO: 65
  source 1..114: mol_type = other RNA
  misc_feature 1..114: note = LPG10168 sgRNA backbone

SEQ ID NO: 67 - RNA, 89 nt, synthetic construct
  source 1..89: mol_type = other RNA
  misc_feature 1..89: note = LPG10169 sgRNA backbone
gttttagtactctgtaaaaagttacagaatctactaaaacaaggcaaaatgccgtgtttatctcgtcaacttgttggcgagattttttt

SEQ ID NO: 68 - RNA, 139 nt, synthetic construct
  source 1..139: mol_type = other RNA
  misc_feature 1..139: note = LPG10171 sgRNA backbone
gctatagttccataagaaacaaaggtttcttacgttactatagtaagggcaatgacccgtggcgtttggggatcgcctcatccattacggatattctccccatgtgaaaagcacctaagcataaggctaaggtgctttt

SEQ ID NO: 69 - RNA, 96 nt, synthetic construct
  source 1..96: mol_type = other RNA
  misc_feature 1..96: note = LPG10186 sgRNA backbone
gttttagtgtcatgttgaatagaaagctattcaacatggcaagttaaaataagctttatgcgtattcaaacttttgttaaggcgacatcgcctttt

SEQ ID NO: 70 - RNA, 74 nt, synthetic construct
  source 1..74: mol_type = other RNA
  misc_feature 1..74: note = LPG10190 sgRNA backbone
gccataattcctcaaaggagttattatggtaaggcattatgccgtggcgttggggatcgcctaactccgatttt

SEQ ID NO: 71 - RNA, 85 nt, synthetic construct
  source 1..85: mol_type = other RNA
  misc_feature 1..85: note = LPG10191 sgRNA backbone
gtttcggcactctctcagaaagctgagagaacctgccgaaacaagagttcatctcgaaatcagtcccacttcgtgtggggctttt

SEQ ID NO: 72 - RNA, 94 nt, synthetic construct
  source 1..94: mol_type = other RNA
  misc_feature 1..94: note = LPG10194 sgRNA backbone
gttgcggctggacaaaggtccttccgttaacacgctcgggaacgcaagttccttgcagcacaagatgtgcggcgggcctcggcccgccgcgttt

SEQ ID NO: 73 - RNA, 99 nt, synthetic construct
  source 1..99: mol_type = other RNA
  misc_feature 1..99: note = LPG10195 sgRNA backbone
gtttcagctggatgtcaaaggacatccagaagttgaaatcaagcaagacttaaagtcaagcttctacctttgatccacgctttgtggacagtacatatt

SEQ ID NO: 74 - RNA, 119 nt, synthetic construct
  source 1..119: mol_type = other RNA
  misc_feature 1..119: note = LPG10196 sgRNA backbone
gttggaaatctatccaaagggatagattcccaataaggcgcagcgggatttagctgcactggttgctcacgacatcaacatgtcgtaggggaggctccttcacggggcctccccgtttt

SEQ ID NO: 75 - RNA, 95 nt, synthetic construct
  source 1..95: mol_type = other RNA
  misc_feature 1..95: note = LPG10197 sgRNA backbone
gttatagatgtacttcaaaggaagtacagagttataatcaaacaagtgcttcggcacaagtttctacttatgagtcagttatctgaccattacat

SEQ ID NO: 76 - RNA, 79 nt, synthetic construct
  source 1..79: mol_type = other RNA
  misc_feature 1..79: note = LPG10198 sgRNA backbone
gctatagttccttaccaaagggtaagttgctgtagtaagggcaacagacccgaggcgttggggatcgcctagcccgttt

SEQ ID NO: 77 - RNA, 85 nt, synthetic construct
  source 1..85: mol_type = other RNA
  misc_feature 1..85: note = LPG10200 sgRNA backbone
gttgcggctggaccacgaaagcgtggtctggccgttaacaagccaagacggcaccagataaggcgctcgctccggcgggcgcttt

SEQ ID NO: 78 - RNA, 123 nt, synthetic construct
  source 1..123: mol_type = other RNA
  misc_feature 1..123: note = LPG10203 sgRNA backbone
gccataattcctccaaagggagttattatggtaaggcattatgccgcggcgttgggaatcgcctatattcgattaatatcgaatcttcccacaaaatgactaacttagtttagtcattttttt

SEQ ID NO: 79 - RNA, 122 nt, synthetic construct
  source 1..122: mol_type = other RNA
  misc_feature 1..122: note = LPG10204 sgRNA backbone
gccataattcctccaaagggagttattatggtaaggcattatgccgtggcgttggggatcgcctacatccgattagatcggattctccctaaaaatgactaactttgtttagtcattttttt

SEQ ID NO: 80 - RNA, 122 nt, synthetic construct
  source 1..122: mol_type = other RNA
  misc_feature 1..122: note = LPG10205 sgRNA backbone
gccataattcctccaaagggagttattatggtaaggcattatgccgtggcgttggggatcgcctacatccgattatatcggattctccctaaaaatgactaactttgtttagtcattttttt

SEQ ID NO: 81 - RNA, 86 nt, synthetic construct
  source 1..86: mol_type = other RNA
  misc_feature 1..86: note = LPG10205 sgRNA2 backbone
gccataattcctccaaagggagttattatggtaaggcattatgccgtggcgttggggatcgcctacatccgattatatcggattct

SEQ ID NO: 82 - RNA, 107 nt, synthetic construct
  source 1..107: mol_type = other RNA
  misc_feature 1..107: note = LPG10207 sgRNA backbone
gtcatagttccattaaagcaaaggctttgatgtttctatgataagggtttcggcccgtggcgtcggggatcgcctgcccattttgatgggcttctccccatctattt

SEQ ID NO: 83 - RNA, 122 nt, synthetic construct; identical to SEQ ID NO: 79
  source 1..122: mol_type = other RNA
  misc_feature 1..122: note = LPG10208 sgRNA backbone

SEQ ID NO: 84 - skipped

SEQ ID NO: 85 - RNA, 169 nt, synthetic construct
  source 1..169: mol_type = other RNA
  misc_feature 1..169: note = LPG10165 sgRNA L1
gagcggacagcagcttcctatatctcgtacgtcatagttccattaaagccattaaagagatttatagagttattatggtaaggcattatgccgtggcgttggggatcgcctaactccgatttttatcggatttccctaaaaatgactaactttgtttagtcattttttt

SEQ ID NO: 86 - RNA, 137 nt, synthetic construct
  source 1..137: mol_type = other RNA
  misc_feature 1..137: note = LPG10166 sgRNA L1
gagcggacagcagcttcctatatctcgtacgttgcggttggccctcaatcaaaggagggcctcccgttaacaagcttatgcacaaaatggggcaccctgcggggtgccccttccatttgtgagcgcgactggttttt

SEQ ID NO: 87 - RNA, 144 nt, synthetic construct
  source 1..144: mol_type = other RNA
  misc_feature 1..144: note = LPG10167 sgRNA L1
gagcggacagcagcttcctatatctcgtacgtcatagttccattaaagccattaaagaatggctttgatgtttctatgataagggtttcggcccgtggcgttggggatcgcctgcccatttcaatgggcttctccccatttatt

SEQ ID NO: 88 - RNA, 144 nt, synthetic construct; identical to SEQ ID NO: 87
  source 1..144: mol_type = other RNA
  misc_feature 1..144: note = LPG10168 sgRNA L1

SEQ ID NO: 89 - RNA, 119 nt, synthetic construct
  source 1..119: mol_type = other RNA
  misc_feature 1..119: note = LPG10169 sgRNA L1
gagcggacagcagcttcctatatctcgtacgttttagtactctgtaaaaagttacagaatctactaaaacaaggcaaaatgccgtgtttatctcgtcaacttgttggcgagattttttt

SEQ ID NO: 90 - RNA, 169 nt, synthetic construct
  source 1..169: mol_type = other RNA
  misc_feature 1..169: note = LPG10171 sgRNA L1
gagcggacagcagcttcctatatctcgtacgctatagttccataagaaacaaaggtttcttacgttactatagtaagggcaatgacccgtggcgtttggggatcgcctcatccattacggatattctccccatgtgaaaagcacctaagcataaggctaaggtgctttt

SEQ ID NO: 91 - RNA, 126 nt, synthetic construct
  source 1..126: mol_type = other RNA
  misc_feature 1..126: note = LPG10186 sgRNA L1
gagcggacagcagcttcctatatctcgtacgttttagtgtcatgttgaatagaaagctattcaacatggcaagttaaaataagctttatgcgtattcaaacttttgttaaggcgacatcgcctttt

SEQ ID NO: 92 - RNA, 104 nt, synthetic construct
  source 1..104: mol_type = other RNA
  misc_feature 1..104: note = LPG10190 sgRNA L1
gagcggacagcagcttcctatatctcgtacgccataattcctcaaaggagttattatggtaaggcattatgccgtggcgttggggatcgcctaactccgatttt

SEQ ID NO: 93 - RNA, 115 nt, synthetic construct
  source 1..115: mol_type = other RNA
  misc_feature 1..115: note = LPG10191 sgRNA L1
gagcggacagcagcttcctatatctcgtacgtttcggcactctctcagaaagctgagagaacctgccgaaacaagagttcatctcgaaatcagtcccacttcgtgtggggctttt

SEQ ID NO: 94 - RNA, 124 nt, synthetic construct
  source 1..124: mol_type = other RNA
  misc_feature 1..124: note = LPG10194 sgRNA L1
gagcggacagcagcttcctatatctcgtacgttgcggctggacaaaggtccttccgttaacacgctcgggaacgcaagttccttgcagcacaagatgtgcggcgggcctcggcccgccgcgttt

SEQ ID NO: 95 - RNA, 129 nt, synthetic construct
  source 1..129: mol_type = other RNA
  misc_feature 1..129: note = LPG10195 sgRNA L1
gagcggacagcagcttcctatatctcgtacgtttcagctggatgtcaaaggacatccagaagttgaaatcaagcaagacttaaagtcaagcttctacctttgatccacgctttgtggacagtacatatt

SEQ ID NO: 96 - RNA, 149 nt, synthetic construct
  source 1..149: mol_type = other RNA
  misc_feature 1..149: note = LPG10196 sgRNA L1
gagcggacagcagcttcctatatctcgtacgttggaaatctatccaaagggatagattcccaataaggcgcagcgggatttagctgcactggttgctcacgacatcaacatgtcgtaggggaggctccttcacggggcctccccgtttt

SEQ ID NO: 97 - RNA, 125 nt, synthetic construct
  source 1..125: mol_type = other RNA
  misc_feature 1..125: note = LPG10197 sgRNA L1
gagcggacagcagcttcctatatctcgtacgttatagatgtacttcaaaggaagtacagagttataatcaaacaagtgcttcggcacaagtttctacttatgagtcagttatctgaccattacat

SEQ ID NO: 98 - RNA, 109 nt, synthetic construct
  source 1..109: mol_type = other RNA
  misc_feature 1..109: note = LPG10198 sgRNA L1
gagcggacagcagcttcctatatctcgtacgctatagttccttaccaaagggtaagttgctgtagtaagggcaacagacccgaggcgttggggatcgcctagcccgttt

SEQ ID NO: 99 - RNA, 115 nt, synthetic construct
  source 1..115: mol_type = other RNA
  misc_feature 1..115: note = LPG10200 sgRNA L1
gagcggacagcagcttcctatatctcgtacgttgcggctggaccacgaaagcgtggtctggccgttaacaagccaagacggcaccagataaggcgctcgctccggcgggcgcttt

SEQ ID NO: 100 - RNA, 153 nt, synthetic construct
  source 1..153: mol_type = other RNA
  misc_feature 1..153: note = LPG10203 sgRNA L1
gagcggacagcagcttcctatatctcgtacgccataattcctccaaagggagttattatggtaaggcattatgccgcggcgttgggaatcgcctatattcgattaatatcgaatcttcccacaaaatgactaacttagtttagtcattttttt

SEQ ID NO: 101 - RNA, 152 nt, synthetic construct
  source 1..152: mol_type = other RNA
  misc_feature 1..152: note = LPG10204 sgRNA L1
gagcggacagcagcttcctatatctcgtacgccataattcctccaaagggagttattatggtaaggcattatgccgtggcgttggggatcgcctacatccgattagatcggattctccctaaaaatgactaactttgtttagtcattttttt

SEQ ID NO: 102 - RNA, 152 nt, synthetic construct
  source 1..152: mol_type = other RNA
  misc_feature 1..152: note = LPG10205 sgRNA L1
gagcggacagcagcttcctatatctcgtacgccataattcctccaaagggagttattatggtaaggcattatgccgtggcgttggggatcgcctacatccgattatatcggattctccctaaaaatgactaactttgtttagtcattttttt

SEQ ID NO: 103 - RNA, 116 nt, synthetic construct
  source 1..116: mol_type = other RNA
  misc_feature 1..116: note = LPG10205 sgRNA L1 v2
gagcggacagcagcttcctatatctcgtacgccataattcctccaaagggagttattatggtaaggcattatgccgtggcgttggggatcgcctacatccgattatatcggattct

SEQ ID NO: 104 - RNA, 137 nt, synthetic construct
  source 1..137: mol_type = other RNA
  misc_feature 1..137: note = LPG10207 sgRNA L1
gagcggacagcagcttcctatatctcgtacgtcatagttccattaaagcaaaggctttgatgtttctatgataagggtttcggcccgtggcgtcggggatcgcctgcccattttgatgggcttctccccatctattt

SEQ ID NO: 105 - RNA, 152 nt, synthetic construct; identical to SEQ ID NO: 101
  source 1..152: mol_type = other RNA
  misc_feature 1..152: note = LPG10208 sgRNA L1

SEQ ID NO: 106 - RNA, 165 nt, synthetic construct
  source 1..165: mol_type = other RNA
  misc_feature 1..165: note = LPG10165 sgRNA L2
gatatagacgttgtggctgttgtagtgtcatagttccattaaagccattaaagagatttatagagttattatggtaaggcattatgccgtggcgttggggatcgcctaactccgatttttatcggatttccctaaaaatgactaactttgtttagtcattttttt

SEQ ID NO: 107 - RNA, 133 nt, synthetic construct
  source 1..133: mol_type = other RNA
  misc_feature 1..133: note = LPG10166 sgRNA L2
gatatagacgttgtggctgttgtagtgttgcggttggccctcaatcaaaggagggcctcccgttaacaagcttatgcacaaaatggggcaccctgcggggtgccccttccatttgtgagcgcgactggttttt

SEQ ID NO: 108 - RNA, 140 nt, synthetic construct
  source 1..140: mol_type = other RNA
  misc_feature 1..140: note = LPG10167 sgRNA L2
gatatagacgttgtggctgttgtagtgtcatagttccattaaagccattaaagaatggctttgatgtttctatgataagggtttcggcccgtggcgttggggatcgcctgcccatttcaatgggcttctccccatttatt

SEQ ID NO: 109 - RNA, 140 nt, synthetic construct; identical to SEQ ID NO: 108
  source 1..140: mol_type = other RNA
  misc_feature 1..140: note = LPG10168 sgRNA L2

SEQ ID NO: 110 - RNA, 115 nt, synthetic construct
  source 1..115: mol_type = other RNA
  misc_feature 1..115: note = LPG10169 sgRNA L2
gatatagacgttgtggctgttgtagtgttttagtactctgtaaaaagttacagaatctactaaaacaaggcaaaatgccgtgtttatctcgtcaacttgttggcgagattttttt

SEQ ID NO: 111 - RNA, 165 nt, synthetic construct
  source 1..165: mol_type = other RNA
  misc_feature 1..165: note = LPG10171 sgRNA L2
gatatagacgttgtggctgttgtagtgctatagttccataagaaacaaaggtttcttacgttactatagtaagggcaatgacccgtggcgtttggggatcgcctcatccattacggatattctccccatgtgaaaagcacctaagcataaggctaaggtgctttt

SEQ ID NO: 112 - RNA, 122 nt, synthetic construct
  source 1..122: mol_type = other RNA
  misc_feature 1..122: note = LPG10186 sgRNA L2
gatatagacgttgtggctgttgtagtgttttagtgtcatgttgaatagaaagctattcaacatggcaagttaaaataagctttatgcgtattcaaacttttgttaaggcgacatcgcctttt

SEQ ID NO: 113 - RNA, 100 nt, synthetic construct
  source 1..100: mol_type = other RNA
  misc_feature 1..100: note = LPG10190 sgRNA L2
gatatagacgttgtggctgttgtagtgccataattcctcaaaggagttattatggtaaggcattatgccgtggcgttggggatcgcctaactccgatttt

SEQ ID NO: 114 - RNA, 111 nt, synthetic construct
  source 1..111: mol_type = other RNA
  misc_feature 1..111: note = LPG10191 sgRNA L2
gatatagacgttgtggctgttgtagtgtttcggcactctctcagaaagctgagagaacctgccgaaacaagagttcatctcgaaatcagtcccacttcgtgtggggctttt

SEQ ID NO: 115 - RNA, 120 nt, synthetic construct
  source 1..120: mol_type = other RNA
  misc_feature 1..120: note = LPG10194 sgRNA L2
gatatagacgttgtggctgttgtagtgttgcggctggacaaaggtccttccgttaacacgctcgggaacgcaagttccttgcagcacaagatgtgcggcgggcctcggcccgccgcgttt

SEQ ID NO: 116 - RNA, 125 nt, synthetic construct
  source 1..125: mol_type = other RNA
  misc_feature 1..125: note = LPG10195 sgRNA L2
gatatagacgttgtggctgttgtagtgtttcagctggatgtcaaaggacatccagaagttgaaatcaagcaagacttaaagtcaagcttctacctttgatccacgctttgtggacagtacatatt

SEQ ID NO: 117 - RNA, 145 nt, synthetic construct
  source 1..145: mol_type = other RNA
  misc_feature 1..145: note = LPG10196 sgRNA L2
gatatagacgttgtggctgttgtagtgttggaaatctatccaaagggatagattcccaataaggcgcagcgggatttagctgcactggttgctcacgacatcaacatgtcgtaggggaggctccttcacggggcctccccgtttt

SEQ ID NO: 118 - RNA, 121 nt, synthetic construct
  source 1..121: mol_type = other RNA
  misc_feature 1..121: note = LPG10197 sgRNA L2
gatatagacgttgtggctgttgtagtgttatagatgtacttcaaaggaagtacagagttataatcaaacaagtgcttcggcacaagtttctacttatgagtcagttatctgaccattacat

SEQ ID NO: 119 - RNA, 105 nt, synthetic construct
  source 1..105: mol_type = other RNA
  misc_feature 1..105: note = LPG10198 sgRNA L2
gatatagacgttgtggctgttgtagtgctatagttccttaccaaagggtaagttgctgtagtaagggcaacagacccgaggcgttggggatcgcctagcccgttt

SEQ ID NO: 120 - RNA, 111 nt, synthetic construct
  source 1..111: mol_type = other RNA
  misc_feature 1..111: note = LPG10200 sgRNA L2
gatatagacgttgtggctgttgtagtgttgcggctggaccacgaaagcgtggtctggccgttaacaagccaagacggcaccagataaggcgctcgctccggcgggcgcttt

SEQ ID NO: 121 - RNA, 149 nt, synthetic construct
  source 1..149: mol_type = other RNA
  misc_feature 1..149: note = LPG10203 sgRNA L2
gatatagacgttgtggctgttgtagtgccataattcctccaaagggagttattatggtaaggcattatgccgcggcgttgggaatcgcctatattcgattaatatcgaatcttcccacaaaatgactaacttagtttagtcattttttt

SEQ ID NO: 122 - RNA, 148 nt, synthetic construct
  source 1..148: mol_type = other RNA
  misc_feature 1..148: note = LPG10204 sgRNA L2
gatatagacgttgtggctgttgtagtgccataattcctccaaagggagttattatggtaaggcattatgccgtggcgttggggatcgcctacatccgattagatcggattctccctaaaaatgactaactttgtttagtcattttttt

SEQ ID NO: 123 - RNA, 148 nt, synthetic construct
  source 1..148: mol_type = other RNA
  misc_feature 1..148: note = LPG10205 sgRNA L2
gatatagacgttgtggctgttgtagtgccataattcctccaaagggagttattatggtaaggcattatgccgtggcgttggggatcgcctacatccgattatatcggattctccctaaaaatgactaactttgtttagtcattttttt

SEQ ID NO: 124 - RNA, 112 nt, synthetic construct
  source 1..112: mol_type = other RNA
  misc_feature 1..112: note = LPG10205 sgRNA L2 v2
gatatagacgttgtggctgttgtagtgccataattcctccaaagggagttattatggtaaggcattatgccgtggcgttggggatcgcctacatccgattatatcggattct

SEQ ID NO: 125 - RNA, 133 nt, synthetic construct
  source 1..133: mol_type = other RNA
  misc_feature 1..133: note = LPG10207 sgRNA L2
gatatagacgttgtggctgttgtagtgtcatagttccattaaagcaaaggctttgatgtttctatgataagggtttcggcccgtggcgtcggggatcgcctgcccattttgatgggcttctccccatctattt

SEQ ID NO: 126 - RNA, 148 nt, synthetic construct; identical to SEQ ID NO: 122
  source 1..148: mol_type = other RNA
  misc_feature 1..148: note = LPG10208 sgRNA L2

SEQ ID NO: 127-147 - skipped (21 entries)

SEQ ID NO: 148 - DNA, 3231 bp, synthetic construct
  source 1..3231: mol_type = other DNA
  misc_feature 1..3231: note = human codon optimized LPG10165
atgaagtacagcattggcctggatatcggcatcgcttccgtgggctgggccgtcatcaacgaggatatcgagaggatcgaagacatgggcatcagaattttcgatgccgcagagaatcctaaggacgggagctctctgagcacaccgagaagggaggcccggtctaccaggaagcggctgcgcagacgccgtcatcgcgttgagcgcattcgtcagttcattatccagaaggggttgctgacacaggtgcagatggagcagctgtatgattggaaggccgaggatctggatatttggctgatcagagtgaacggacttgaacgcaagctcactgatcgcgagttcgctcgcgtcctgattcatctggttaagaaccgcggattcaagtctaaccgcaagagcgaactcaaggagggcgacaatggagtggtcctgtccgccgtccaggagaacaagcagttgatggaagagaagggctaccagactatcgccgaaatgctcctgtttgacgaacggtttgagggatgcaaacgcaataagggcggtgcctactctcatgtcgtggccaggtctgacctggaacatgagatccgtctcatcttccagaaacagcgcgagtatggtcatgcattcagcacgaccgaaaatgaggaagcctacattaacatctggtcaagccaacgcccattcgccaccaaggatgacatcgctaaaaagatcggttattgtaccctggaacccaaggagaaacgcacccctaagagcacctacactttcgagcgcttccgcgctatcgataagctgaacaggctgcgcatcctgtccgctatcacccctagccgcgagttgacacaggaagagagagatgacgtcctgaatagcctgttcagcaagaaagaggtgaagtataaagagctgcgtaagctcctgcgcttgaaggacgaacaaagattcaacgaaatttattacgcccccaacgagagtaatgaaaagaacgagaaccgtaccttcctctctttggagtctcagcacaaaatcagggccattatcaagcaggtggagggcaagaacgtgaacgattcctaccgcccaatcgacctggatacctttgcctacgccctgaccgtcttcaaagacgatcaggacattcgcgactacctgcagaaccgctatgtcagttcaaacggcaaaaaggtgctgaatctggccaacctggagtataaggagaaattgattgaagagctcctgcaactgtccttcacgaagttcggccatctctccctgaaggctctgaagaacattcttccttatatggagcagggcatgccataccaccaagcctgtgctgaggctggctatacattcaaccagcgggtgaataaggagaagcagtacctcttgcccgttatcccaaccaaggacatcgcaaacccggtagttatcagatccatgtcccaggttcgtaaggtggtcaacggtattatcaaaaagtatggctccccatccgccatttacattgagctcgctcgcgagatgggccgcgtctacaaagaaaggaaggagctggagaagcagtacaacaaaaacagggaaatcaacgaaggggccaagaaacacatcgttgagctccacccccagcttggagatccccgcggtcatgacatcctgaagtataaactgtggaaggagcaggacggccgttgcgcttactctttccagcctatctccatcgagcgtctgttccacatcggatatgccgaagtggaccacatcattccatacagtcgctcctttgatgactccaactccaacaaggtgctcgtgatcgcagccgagaaccagaacaagcagaacaggaccccttatgaatggtttggacataacgagatcaaatggcagaaatttacatcctttgtaaccacaatgaaagtgtctaaaaagaaaaaggggctgttgctgaaaaaggactttgatgaggaccaggccgaagagttcagaagcaggcacttgaacgacacaaggtatatcactaggttcatcaagaccttcatcgaggataatctcctgtttcgcaccgaagagaacaggaagcagtatgcacacacggtaaatggcgcttacacctcccttatgaggaagcgctggggttttaacaagaaccgccaggagaacgatctccaccatgccctcgacgccgtgattatcgccgtgtccctgcctttcaaacatcgtgtaagtgcgtacttcaagcgtagagaggaatacgcccacaaccagctgaagcgcgagggcgaatttttccccgagccatggcctgaattcatccacgagctcgagatccgcatgatgcaggagcccgaaaagatgaagctggcaatggagagcctcgatctgaagacctacgacgagtcatttatcaatgagctgaacccagtgttcgtgagtcgtatgccgaagcgtagcatcaagggtcagatccacgaagagactctgaagcgtgtccgtgggtacacagaggatgggtatattcgcaccgtgaaaaaggtccgtctcgaccagatcccattcgacaagaatggcgacttctccatgtttggtaaagagactgacatgaagacctacgaggccatcaagaataggtacctggagttcggaaaagataagaaaaaggcattcaactctcccctgtataaacccgccaaaaaccctgagaacgcccccattatccggtccgtgaagatcgaggacaaggccaaccgcgtggtaatgctcgacgagaagaccgcggccgacaacgcgagtatcgtccgtacagaagtttttcgccataagggaactggcaactattttttgacccctgtgtacgtagccgatgtgctcagcaaaaggatcccagaccgcgtcatcacgaccaaaaagccctacagcgaatggaagcgcatcactgatgacttcgagttcctcttctccctgtaccccaacgatctgatccgggtcaagatgccgaaagagaaggagactaagacaaatatgaaagagaagtatgtgtggcaggaaaacttcatgtatttcaaaggtgtgcattcaggtagcgccggtgtgcgcatgatcgaccacatgaacagcttcgaggacgagattggcgttcagaaactgattatcttcgaaaagtaccaggtggaccctctgggtagaatcactaaagtgcacggtgagaagcgccacggtatt

SEQ ID NO: 149 - DNA, 3435 bp, synthetic construct
  source 1..3435: mol_type = other DNA
  misc_feature 1..3435: note = human codon optimized LPG10166
atgggaatcaagaactcaaagccgtatcgactgggcctggatctgggcagcaacagcctcggctggtttgtcacgtatctggaaaagcgtggggaccacgacgagcctgtcgcattaggtccaggcggggtccgcattttcccagacggtcgggacccacaatccggaatgtcaaatgctgtagatagacgcatggctaggggagcacgtaaaagacgtgaccgtttcgttgagcgtcggaaggagctcatcgcagcgctggttaaatgcggcctgcttcccaacgatagccgcgagcggcggacgctggaaaggctcgatccttatgctctcagacgcgcggccttgatcgatgctctgcccgcacaccatattgggcgcgctttattccatcttaaccaaaggagaggattccaatcaaaccgaaagaccgattctaaacaatccgaagatggcgcaattaagcaggctgccacaaagcttatggccgtcatggctgaagagtctgctgctaccctgggcagtttcctggccgaccgacacctttcagatgcgtatttggaccgacagaatgcggtgagggccgaacttgtcagacttggcaaagaccacctgaccggcaatgctcgtaagaaggcctgggccaaaacaagaaagcggttatttggcgatgaagttctcccacccaaagatggacctgatggagtcagagcccgtgtcaccatgatcggtacaaaggcttcatatgatttctaccctacacgtgcgatggtgttggatgagtttaacgccatttgggcagcacagcgtgaacatcaacctgcaatgactgatgaagcgaagaaagagattgagcacattattttcttccagcgtcccctcaagccagccattgtagggaagtgtactcttgaccccgcgacacggcccttcaaagaagatccagaaggctatcgagctccgtggagtcatcctcttgcacaaaggtttcggatatttagcgaagcccgaaacttggaaataagagaaatcggaaagggctcccgaaagctcacaaaggaacaatccgacctcgtcgtcgccgctcttctggcgcacaaagaggtgaaatttgacaagctgcgcactctcctgaaactcccacctgaggccaagtttaacctcgaaagtgacaggcgggccgcccttgacggcgatgcaaccgcggccagactgtctgataagaaagggttcgggaaagtgtggcgaggatttccactggagcgtcaaattgccatcgttactaaacttgaggaaactgagaatgaagatgaattaatcgcttggctggaaaaggaatgcgctctcgacggggccgcggcggcaagagtggcaaacacaacactccccgatggtcattgccgcttggggttgagagcgataggcaaaatcgtgcccattatgcaaaatgagctcgacgatgacggagtttccggtgcgggctatcacattgccgccaagcgggccgggtacgaccatgcaaagttacctaccggcgaacaacttaatcggttaccatactatggccaatggttggcagatgctgtagtcgggactggtgacgctcgagacgggaaggagaaacaatatggccaattccccaacccgacagtccatattggcctggggcaactccgtcgattagtgaatgagttaattgataattacggaccccctactgaaatcgccattgaattcactcgggctcttaagctgtctgaacaacaaaaggccgactggcaaagggagcaaagacggaatcaagataagaataccgcgcgagcagccgagctggggaagttcggctttccggcaaacccacgcaatttacttaagatgaggttgtgggaagaactcgcagcagatcctttggatcgcaaatgtatatacacaggagagcagatatcaatcgagagattgctgtccgaggaagtcgacatagaccatatcttacccatcgcaatgaccctcgatgattccgccgcaaataagatcatctgtatgcgctacgcgaatcgtcacaaacgcaaaatgaccccagttgaggccttcgggagcagccctacactgcaaggccacagatacgactgggatgcaattgccgcccgtgctgcgaatctgccccgaaacaagaggtggcgctttgatgcgaatgctagggaagaatttgagaaaaggggcggctttctcgctaggcaacttaatgagaccggatggcttgcccgattggctaagcaatacctgggagctatagccgaccccaacaggatatgggtagtccctgggagactgacagctatgttacggggaaaatggggcttgaacgcactgttacctgaccacaattatgcaggggtacaagataaagctgaagagtttagagcatccaccgacgatatggagttttccggaataaagaacagggctgatcatcgccaccacgccattgacggactcgttgtcgctctgactgaccgcagcctgctgtggaaaatggctaacgcctacgacgaggagcgggaaaagttcgtcattgagccaccttgggctaccatgcgggacgatctgaagtccgctctcgataagatggttgttagccataaggcggatcatggcatagaaggcaagttacatgaggacactgcctacggggtcctgaaagagccggaaaagattgacgatcaagacaaggatggggccaatctcgtttaccgcaaggcagttgaagctctcaacgacaacgagatagaccgtattcgagatagaaggctcagaaccatcgtgcgcgaccacgtggacgccgagaagaagaaaggggtgggcttagctgacgccctcagacaactcactgaacttagagaccatccacaaattaagcatggactcaggcacgttcgaatcttgaagaaggagaagtcagagtatcttgtgcctatcgccaaccgtaagacaggacaattctacaaagcgtatagtgcaggcgaaaatttctgtgttgaagtgtttgagaccgccgacgggaagtgggatggcgaggctgtccgacggtttgatgcaaatcagcaaaacgcaggagcgaaaaccccacatgccctgcagtggcgtatcgcccatcccgatgcgaaactggttatgcgcattcataagggcgacctgattgctttggactataatggaacccggaccatcatggtagttcgccaattggaagccagtaacaatagattcaaactggcaccgcataacgagacgggcaatttgcaaacgcgtcataatactgccaatgatgtagaccctttcagatggctgatagccagttataatgctttgaagaaagccaatgccgtgccagtcagagtcgatgaacttggtcgcgtttggagaatcgcccctgga

SEQ ID NO: 150 - DNA, 3213 bp, synthetic construct
  source 1..3213: mol_type = other DNA
  misc_feature 1..3213: note = human codon optimized LPG10167
atgtctgaattggattaccgtattggccttgacatcggcacgaattccatcgggtggggcgtaatcgagttattttggaagaaggatcgggaaaggtatgaaaaggttaaaatcgtggataaaggtgttaggatgtttgataaagcagaaataccaaagaccggtgcaagccttgccgaacctaggagaattgctcggtcctcacggagacgcttgaatcgcaagtcccaaaggaagaaggatatacgaaacctgctcgtgcaacacggggtaatcacacaaaaggaattagacagtctctatccactttctaagaaagcaatggatatatgggacatccggctggacggccttgacaggttgctcaaccactttgaatggacaagactgctcattcacttggctcaaaggcgaggctttaaatctaatagaaaatctgaactgaaagatgccgaaactggcaaagtactctcttctatccaagtaaatgagaaacgtttaagtctctacagaaccgtgggtgagatgtggataaaggatgcagattttataaaatacgacagaaggagaaatagcccgaatgaatacgtcttcagcgtcagccgcgcgaatctggaaaaggaaattgtgacgttattcgaaacgcaaagaaaatttcaatccccttatgctagtaagaacttacaggaagcctatctgcaaatctgggctcatcaactgcctttcgcgtccggcaatgctatcctcaataaagtggggtactgctcactcctcaaaggaaaggaaagacggattcccaaagcgacttatacgttccaatatttctcagcactggaccaagtcaatcggacccgattgggaccagactttcaaccatttacgcaggagcaacgggagattattttagacaaaatgttccaacggacggattattacaagaagaaaactgttcctgaagtaacctactacgatatcaggaaatggttagagttggacgaaaccatccaattcaaaggactcaactacgatcctaacgaggagttgaagaaaattgaaaagaaaccatttatcaaccttaaagcattctacgagatcaagaaggtggtcgccaactatgcagaacgcacaaatgaagcgtttagcacattagactatgacgcaattgcttatgcgctcacagtctacaagactgacaaagacatacggagttatctgaagagcagccataatctgtcaaaacggtgttacgacgatcagctcatagaagaactcctttctctgtcctatactaaattcgggcatctgtcccttaaagccatcaactacgtgttgccgatcatgcaagaaggcaggacttataaagaagctgctgatcagctgggatacgataccaccggccttaagaaagaaaagaggaataaatttctcccgctcatcccagacgagatcaccaaccctatagtaaaacgagccctgacacaagcccgcaaagtagttaatgcgattatccgccgctatgggtcaccccatagcgtacacatcgaactcgcacgcgaactgagcaagaatcatgatgagcggaagaagatagtgagcgctcaggacgagaattataagaacaacaaaggcgcgatttccgtcctgagcgaatatggaattctcgacccaactggctatgatattgtcaggtacaagctctggaaagagcaaggcgaacgttgcgcctattcactcaaggagattccacccgacaccttcttcaatgaacttaagaaggaaagaaatggttcccccatattggaagttgatcacgtgttaccctacagccaaagcttcattgactcataccacaacaaagtattagtgtacagtgacgagaacagaaagaaaggtaaccgcataccttacacatactttctggaaacaaataaagattgggagtacttcgaaacctatgtgcggagcaataaacttttctctaagaagaaaagagagtatctgctcaagaaggcttaccttccacgcgagtccgaacttattaaagaaagacacttgaacgatacaaggtacgcctcagcatttcttaagaactttatcgaacaaaatctgcaattcaaggaagtcgaggataacttaagaaagagacgcgtgcaaacggtgaacggagtgatcaccgcacacttccggaagcgctggggccttgaaaaggatcgccaagagacatacctgcaccatgcaatggacgccattgtggtagcttgcacggatcatcatatggtcactcgagtaactgaatactatcaaatccgtgaatcaaacaagagcgtcaagaagccatactttcccatgccgtgggaaggattccgtgatgagttgctttcccatttggcaagtcaacccatcgccaagaaaatctccgaagaactcaaagccggttaccagtcctttgattatatattcgtctcacgaatgcctaaaaggtccgtcacaggagcggcgcatgatcagaccataatgcgtaaaggcggcatagataagaagggcaaaactataataattaaacgcctgcaattgaaagacataaagttcgacgagaacggtgacttcaagatggtcggcaaggaacaagatatggctacgtatgaggcgattaaacgcaggtacctggaacatggcaagaaatcagagaaggctttcgagaccccactctataaaccatctaagagtggccgtgggaatctgataaaacgcgtgaagattgaagttcaaaccaaaagtttcgtccgcgaggtgaacggcggcgtcgctcaaaacggcaatttggtgagagttgacctctttgaaaaggacgcaaaatattatatggtaccaatttatgttcccgatacggtcttcagtgaattaccgaataaagccgtaactagctctaagggatacaagcaatggcttactctggataattcctttatgtttaagttttctctgtatccctacgatctggtccggctcgttaaaggtaacgaagacaggtttctgtattttggcaccttggacatagatagcgacaggcttatcttcaaagatgtgaacaaaccaagcaagcaaaccgaataccggtatagcctcaaaactatcgaagacctcgagaaatatgaagttggagttctcggtgacttgcgcttggtcagaaaggaaactcgacgaaatttccag

SEQ ID NO: 151 - DNA, 3216 bp, synthetic construct
  source 1..3216: mol_type = other DNA
  misc_feature 1..3216: note = human codon optimized LPG10168
atgagcgaactggattatcgaataggactcgacataggcacaaattccataggctggggagccatagagctgtcctggaacaaagatagggaaaggtatgaaaaggttaggatagtggataaaggtgtgagaatgtttgataaggcggaaattccaaagactggcgccagcctcgcagagccccggcgaatagcccgaagctcccgccgcaggttgaatcgtaagtcccagagaaagaaagatatacgaaatctgctggttcaacacggcgtaattatacagaaagagttggattctctttatcctctgtcaaagaagagtatggacatctgggatataagattagatggtctcgaccgcctcttgaaccactgcgaatgggcgaggctgttaatacatttggcccaaagaaggggatttaagagcaacaggaagtccgaattaaaagacactgaaaccggtaaagtcctgagctcaatacaggtgaacgagaagagactgtccctctaccgaactgtaggtgaaatgtggatgaaagatcctgactttaacaagtacgaccgcaagcggaactctcctaacgaatatgttttcagcgtcagtagggctgacttggaaaaggagattgttaccttgtttgaggcccaaaggaaattccaaagcagctatgcgtcaaaggacctgcaagaaacctatctgcaaatctgggcgcatcaattgccgttcgcttccggaaatgcaatcctgaataaggtcgggtattgctcactcctgaagggaaaggagcgtcgcataccaaaagcaacatatactttccagtatttctccgctttggatcaagtcaatcgcacgagattgggccccgactttcaacccttcactaaagaacaaagggaaattatcctcgataagatgttccaacgtactaactactacgagaagaaaaccattcctgaggttacatactatgatatccggaaatggctggaactcgatgagacaattcaattcaagggattgaattatgaccccaacgaagagttgaagaagatagagaagaaacccttcattaatctgaaggcgttctatgagattaagaaagtcgttgccaattatgcagaacggactaacgaggagttctctactctcgactacgatgcaatcgcatacgcactgaccgtttataagactgacaaggatatccgcagctatttgaaaagttctcataatttatcaaagaggtgctacgacgatcaacttatagaagagctcctttccctgtcttacactaaatttggacacctctccctcaaggcaactaattacgtcttacccataatgcaagaggggcgaacatacaaggaagcagctgaccaactcggctatgatactaccggcctgaagaaggaaaagcggaataaatttcttcccttgataccagacgagatcacgaacccgattgtgaagcgggccttgacacaagcaaggaaggtcgtcaacgccattatccgccgctatgggtcaccacattctgtccatatcgaacttgcaagggagctttccaagaatcacgacgagaggaagaagattgtctcagcacaagatgaaaactacaagaagaataagggcgcaatttccgtgctttctgaatatggaattctggaccctacgggttatgacatcgttaggtacaagttgtggaaagaacaaggagaaagatgtgcttactctctcaaggaaatcccacccgataccttcttcaatgagctcaagaaggaaagaaacgggagtcctatcctcgaggtagaccatgtacttccttatagccaatcctttattgatagttatcataataaagtcctggtatactccgatgaaaaccgcaagaagggtaaccgcattccatacacctactttctggaaactaacaaggactgggaatatttcgagacatatgtcagatccaacaagcttttctctaagaagaaacgggaatatttgttaaagaaagcttacctgcctcgtgagtccgagttgatcaaagaacgccatcttaacgacactcgctatgcaagcgcattcctgaagaacttcatcgaacaaaatctccagttcaaagaggtcgaagataatttgcgcaaacggagagttcaaactgttaatggcgttatcaccgcacatttcagaaagaggtggggccttgagaaagaccggcaagaaacatatctgcatcacgccatggatgccattgtcgttgcatgcaccgatcatcatatggtcacgcgggtcaccgaacattatcaaatcagggagtcaaacaaatcagttaagaaaccatacttcccaatgccctgggaaggatttcgggacgaactgttgtcacatcttgccagccaacccatcgcaaagaagatttcagaagaactcaaggccggatatcaatccttcgactatatcttcgttagtcggatgcctaagaggagtgtgacaggagctgctcacgatcagaccattatgcggaaaggtggtattgataagaaaggtaagactataatcatcaagagactccagctcaaggatatcaagttcgacgagaatggcgactttaaaatggttggcaaagaacaagacatggccacatatgaagcgatcaaacgtaggtatctggaacatggaaagaaaagtgagaaagcttttgagacacctctctacaagcctagcaaatcagggcgcggaaatttgatcaaacgagtgaaaattgaggtgcaaactaaatcattcgtccgggaagtgaatggcggcgtggcccaaaacgggaatctggtacgggtggacttgtttgaaaaggacgctaagtattatatggtgcccatttacgttccagacacagtcttctctgaactgcccaataaggcagtcaccagctccaaagggtacaagcagtggttgacactggataatagttttacattcaagttcagcttgtatccctatgatttagttcggctggtgaaaggagacgaagataggttcttgtacttcagtaccctggatatcgattctgataggctcatctttaaagatgtgaatagacccagtaaacaaacagagtaccgctattccttgaagacaattgaggaccttgagaaatatgaggttggcattctgggagaccttcgcctcgttagaaaagaaacgcgccgaaactttaacaga

SEQ ID NO: 152 - DNA, 3159 bp, synthetic construct
  source 1..3159: mol_type = other DNA
  misc_feature 1..3159: note = human codon optimized LPG10169
atgaagaagaactacatcttgggcctcgatatcgggatcacgtctgtggggtatggggtgatcgattatgagacaagagacgtgattgatgccggggtgcgcctcttcaaagaggccaacgtggagaataacgagggcagaaggtctaaaagagggacacgtcgattgaagcgcagaaggcgccacaggctccagagagttaagaagctccttttcgattacaacttgctgacggatcactcagaattaactgggattaatccctacgaagcccgtgtaaagggtctgagccaaaagctgagcgaagaagagtttagtgcagcactgctgcatctggccaaaaggcgcggcgtccataatgtgaatgaagtagaagaggacactggcaacgagttaagtacaaaggaacagatctcaaggaactccaaagcattggaagaaaagtacgtggcggaactgcaactcaaccgattaaaagcagagggcgaggtgcgtggctcaattaatcgttttaaaactagtgattacgttaaggaagctaagcaactgctcaaagtacaagaatcctatcaccagcttgatcagtccttcatcgatacctacattgatcttttggagacccggcgaacatattatgaaggccctggagaggactcaccgtttggttggaaggacatcaaggaatggtatgagatgctgatggggcactgtacctacttcccggaagaattgagatgcgtaaagtatgcatacaatgcagatctctacaatgccttgaacgatctcaataacctgattatcgctagagacgaaaacgagaaactggaatattatgaaaagttccagatcatcgaaaacctgtttaagcaaaagaagaaacctacacttaagcagattgcaaaagaaatcctcgtgaatgaagaggacatcaaggggtaccgtgttacaagcaccggaaaaccagagtttactaattttaaagtctatcatgacataaaggatattacggcaagaaaagaaattcttgaaaacgctgagctgttgaatcagatagctgaaatacttacaatttatcagtcctcagtggacatccaggaagaactcgcgaaacttaacttagagctgacacaagaagaaattgagcaaatatctaaactcacgggttataccggcactcactctctcagtttgaaagcaattaatctcattttagacgagctttggcatactaacgataaccaaatgaccatatttaacaggctgaaattggtcccaaagaaggtggacctcagtcaacagaaagagatcccgactaccctggtcgacgattttattctgagccctgtcgttaaacggagtttcatccagagcatcaaggtgattaacgccataataaagaagtatggtcttcccaaagatattatcattgaacttgcacgtgaaaagaattccaaagatgcacagaagattatcaatgaaatgcaaaagcggaaccggcaaactaacgagcgaattgaagagattatccggaccaccggaaaagaaaatgctaagtatcttattgagaaaattaaattacacgacatgcaggaaggcaaatgtctctatagccttgaggccataccgctggaagacctgttgaataaccccttcaattacgaagtagatcacatcatacctcgaagcgtatcattcgacaattcttttaataacaaagtacttgtgaaacaagaagagaattccaagaagggcaatcgtaccccctttcaatacctgtcaagttctgacagcaaaatttcctatggtacattcaagaaacatatcttgaacctggccaagggcaaaggaagaatatccaagaagaagaaagaatatttgctcgaggaacgtgacattaaccgcttcagtgtccagaaggacttcatcaatcgcaatctggtagacaccaggtacgcgacacgcgaattgatgaatttgctgagatcttacttccgcgtaaatgacctggacgtgaaagtgaagtctataaatggcggctttacgagtttcctgcgacgcaaatgggagttcaagaaggagaggaacaagggttacaagcatcacgcggaagacgccctcatcattgctaatgcggattttattttcaaagaatggaagaaacttgataaggccaagaaggtaatggaaaaccagactgttgaagacaagcaagccgaatctatgcccaaaatagaaacagagcaagaatacaaagaaatctttataactccacaccaaatacaacatatcaaggacttcaaggattataagtatagccatcgggtggacaagaagccaaatcgcgaactgataaatgatacgttgtactcaacccgtaaagatgataagagtaacacgctgataataaataatctcaacggtctgtacgacaaagataatgacaaacttaagaaactgattaacaagtccccagagaaactcttgatgtaccactacgatccccagacttaccaaaagcttaaactgatcatggaacaatacggggacgagaagaatcctctctataagtactatgaagagactggaaactatttaacaaaatattccaagaaggacaacggacctgtgattaagaagataaaatactatggtaacaagctcaatgcgcacttggatatcactgacgattaccccaactcccgcaacaaggtagtgaagctgagcctcaagccgtatcgttttgacgtttatttggacaatggcgtctacaaatttgtgacggttaagaacttggatgtcattaagaaagaaaactactacgagataaatagcaaatgctatgaaaaggcaaagaaattgaagaaaataagtgaccaggctgagttcatagcgtccttttataacaatgatttaatcaaggtgaatggcgagctctatcggactatcggcgtcaacaacgatctgttgaatagaatcgaactgaatatgattgacataacatacaaagagtacctggaaaacatgaatgacaaacgaccgcctcgcattataaagacgattgcccgtaaaacccaaagtattaagaaatactccacagatattcttggaaatctgtacgaagtaaaatctaagcaacacccccaaatgattatgaagggt

SEQ ID NO: 153 - DNA, 3249 bp, synthetic construct
  source 1..3249: mol_type = other DNA
  misc_feature 1..3249: note = human codon optimized LPG10171
gtcaagctccaatacgttcttggactggacattggcattgcgtcttgtggctgggcagttattaataccgaaaaggagcgcatcgaggaccttggcgtgcgtatattcgacaaggctgaaaaccccaaagatggcaagtccttagcaacgccccgaagggacgcccggagtacaagaagaacattacggcggaagaagcatagaatgcaaagaattaaaatattgctcgtaaaacatggcttgctcagtaaaaccgagctcgatcatctttatgaaagcgcaactgagaacgacgtatgggatctcagattgaatgcattggaaaggcggctgaacccgaaagaatttgcccgagtactcattcacctcgcgaagcgtcgtggctttaagtcaaatcgcaaagaaacgaccctgtccgaaagcgggcagatcctcgaaaatattagcgaaaatcagcaaataatggagcagcaaaattataggacagtaggcgaaatgatcctgaaggacaagaaattcgaaaaccacaagagaaacaaagatggaacctatataggtacggttacaaggcaacagctgcaagatgaaattcatatgatctttaacgctcaaagactcttcaagaacaattttgcaaccgaagagttcgaatcccactatttagagatatggtctagtcagcggccttatgcgtctaaggaccaaatcgagaaaatgataggatactgcacccttgaacccaaagaaaagcgtgcacctaaagccagctggtcctttcaatattttgtggcccttcagaccataaataacctgcggttaatcagcaaggatcgcattgaggaactgtcattcgaagagaagaagcaaatcatgaatcttgccctcgagaagcccatcgtgaagtacatcgatatccggaaactcctttctatcagcaacgaccttcatttcaacaacttgctctactctacggacactgtggatacaacggttgagaaccgaaaatgtatagaattgaaggagtaccatagcatcaacaaggtttacaagcaaatttacggaaaaggggtgcccaatctcctgccaattgattacgacaccatagcttatgccctcacaattttcaaggacgataaagatatcctcgaatatcttcagaacaagtacgtgaatgctaagggaaagccgatcaataactccgcaaagaaaacatatgacgatatcttcatccaagcccttttgacccttaatttcactaagatgggacatcttagtttcaagagtctcaagaatataatccccttcctggaagatgggctctcttatgacaaagcgtgcgaaaaggcgggttacaactttaaagggactagctatacagaaaagactaaatatctccccgtcatacctcaaaatacaaatcctgtagtacatagggctctgagccaaaccagaaaagttatcaacgcaatcatcaagaagtatggctcccctaaagctatccacattgagaccgccagagaactgagtaaaaccttccaagaacgcaaggagatagattccatgtatcaagataatagcaagaagaacgagcacgcaattcgaaagctgaaagaattaggaaacataaacccctcaggcatcaacatcgttaagttcaagctctggaatgagcaagacggacgatgtatgtatagcggcaagtatattgagccccacaggctcttcgaagaaggatatactgaagtcgatcacgtcttaccatattcaaggagcctcgacgactcatataacaacaaagccttgactctcggtacagagaaccaaggtaaaggcaacaaaacgccctacgaatttatgggaaatacatcaatttggaacgagttcgagactagggtgcagagcaataagaagatcaacaaacggaagcaacagaaactgctgctgcaaaacttttcccacgcacgggaacaagagtttatcgaacgaaatctgaacgacacaagatacgccacgatctacctttcaagcctcattcaacaacatcttatattttctgaatccagcagggaaaagaaagtacataccgtatctggaattataacaagtcatttgcgttcacgttggggatttaacaaggaccgcaaagagggccatattcaccacgctttagatgcagtgattgtggctgtaaccagtgaccatatgattcaaagagtgacgaagtactataaactgaaagaactcaacagaaatctgcaagcgaaacgtataccatttccagaaccctgggaaggcttcagactcgagctcgaggctcggattagtcctaacactcaacaatacctcaaaggtattaggttcaagaactatgccgatataaatttgaccgaaataaaaccaatctttgttagcaggatgcctaaacggtctatcaccggggaactgcatcaagaaacaattcgcaagttcatcggatacaacgagaaaggcaaggttctcacaactattaaaaccaaactggaagatatcccttttgacgctaatggagatttccccatgtatgggaaggaaaccgatctttacacatataacgccatcaaagaaagatatctgagccacaagaaggataagcggaaaagctttcaggagcccttgtataaaccaaccaaaaccggggaaataggtccacttattaaaagcatcaaaattatcgatacaaggacgattgtgaaccccgtgaaccaaggaaagggagtggtgtacaacagtaaaatagcccggacggacgtctttaagaagaatgacaaatactatctgatccccatttatacgatcgacctgatgaagaatattctcccacaaaaggctataacggctggaaaggggtatgaggactggaccacaatagaccattcattcacattcctctttagcttgttccctaacgatctgatccagatcgttcccacgaagaatcgcaccatcaaggccaaaactacagtgtcaaagaaggaagtcctgctgccaagcctcaccggatacttcaaaggggtccattcaggtacagcgggaatcactgtagaaacccatgacggctccgtcatcgcaaacataggatctaaacaactgctgatattcgaaaagtaccaagtagatatcctcgggcactatacaaagataaaagaggagaaacgtattggaatggccacttataatgataacaagaaaagcaccgctttctccagttta

SEQ ID NO: 154 - DNA, 4464 bp, synthetic construct
  source 1..4464: mol_type = other DNA
  misc_feature 1..4464: note = human codon optimized LPG10186
atggccaagcagaaatacacggttggtctggacatagggaccaatagtgtgggatgggccgtgataaaccaagacttcaaactggtctcaggaaagaaacatattaacgataacggaaaacagaaacgctccaggacaaatctttggggcgtcaggctcttcgatgcggccgaaacggctgaggatagacgcctgaagcggggcatgagacgacggattgcaagaagaaaggaaaggttgaattacctgcgtggcatcttccaggcagatatcctggcgttcgatgattctttctttatccgtatggacgagtccttcctgcaggatgatgacaagcaagctacggccttttcctatcgtgaccaatctggggccatgcagactagagtcgtgactgaaaaggaagctgtgaagtatccgctctttaatggcaaaagcggctctggggaaacttatacagatgagagtgcctactacaaccaataccctactatttaccatcttagacaacgacttattgataatcctgcgcaagccgacttacggctcgtgtatttggccatgcaccacattcttaaatacagaggccacttcgtcaatcaaggtcaaacattcgatctcggcaatataaatattgcggggaatctgacaagtgccctcgataagttggatgaagcgtctagcttcaaatttggcctggctgatgtagatgccgatcaagctaacgcaatccttaagaacaagcaatggagtgcctctaagaaagcctatgaactcaacgccttattcgagataatacaggacactgtttatcggagagagaatgagactcaggctgtcacctacgactccttgacagtcaaacaacaggagaaatggcttgccgagaaacagaagcaggtaaaggcattcttaaccggaatagtaggtaatacaatcagtccgaaggacatcttcgctaacaaagactatgacaagaagcaaaacgaggacttccctgagaaaattaagtactcaaacgaaaattttgaagaacagattggagccctcgagaagtatctggacgagaccgaggtcgccgctattgtggccggaaaagatgtgtatgaatctttggtgctgagtaatattctgacgaaaagcactttgtcagggtccatgatagagaagtacaatgtacatggcgcacaactcaagagtttaaaatctttctcacggaaggtgagtgcggagttctatgacaaattatttaacgtagtgaaggatgaaaagggtaaaccacatattggagtgtatgcccaatacgttgacggggttggaaatccagctaaacgcctggctcgagaggacttttacgatgcattaaagaaggtctttgaatccgagtttaagggcttgacttttccggtcggcgagaaagggatagacttcactaaaacggatctgtccgcagatcgagtggcgtttatcagggaaatgaatgaagcaattaatctcgaaaattacttgccaaaacaacggcaagcagataacggagagataccgtatcaagtccacgagcacgaactcattcgcattattgagaaccaaaagcaatattaccccttcctcggggacaaagtccaagtcgcgtatgaagatgaaagtggccaaacccaagtccggagcgaatataagatacaggtgctctttaaattccggataccatattacgtagggaccctcgctaagaatagcgggtgggtcaatgaagatggaaagaagttggtagctcgtaacgtcgcagccaagaatagctgggttgtacgcaatagcgacgagagagtcaccccatggaacttcgaacaagtaattaacaaggaagccagcagtataaattttattgagcgcatgacaaactttgacacatatctgccaaatgaaaaggtccttcccaagaattctttgctgtaccaagaattcatcgtcaacaatgaacttattagctctggctactatctcaacggtcgtaaagaatacttccttccagaacaaaggcaacgtatcattacaagactcttcaaacgctatcgcaaggtctctgccaagcagatgctcgattttcttaagaacgaatatcaaattaagttggatgatgatcccaagaagttattcggactggacacttttgtcaaggttcccagctacaacggaagtctcagtacagtcgtcgatttaaccaagaagatgggcatcagcgaggatctgattgctaactaccctgagcgcttcgaggaaataataaaatggcaaaccatcttcgaagacaagaaaatattgaagaagactattagggaagttaatcataacaagtggtccggcatgctgaccgccgaacaagtcaacaaattgtcaaagagacattataccggctggggccggttaagccaaaagctgctggatggcgttaagacctcacagggccgaaccatcattgaaagcctcagggaaggaatatgtgacaacttcatgcgcctgatcgaagatgaaaagatcgcagagttcatcgccaacgcccaagttgcaggtgcgaaagacggggttttggcttacgacctcgttgaccaactccctgggtctcctgctattaagaagggaatctggcagagtctgcgggtgctccaagaacttgagcactatctgggacgagacgcgatcgggaaagtcgttatcgagatgtccagagatgatgaaagtagccggcgcacaaaggcacggaaacaacaactggaagaattctacaagaagttcaaagaatctaccggtagtgacgtgactgcggagttgaagagagaactttctgaaaaggacgctaaagagattgacgatgaaaaggtcttcctttatttccttcaaaatggtaaaagcatgtattccggagatcagttatacttgtctcgcctggccgattaccaggtggaccacattgttcctcaaacatatatcaaagatgactcattggataataaagtcttggtcacccagagggataaccaaaataaaggcggagacactccttcacaaactgtcgttacccggatgaattcctattgggaaatgcttgccaagaatggtcaggttagtccacgtaagcttgcaaatcttaagaaaggacccatcactttaaaacaacgtgaagggtttatcaaccgtcagctcgtggaaaatcgccaaatcacgaagcacgtcgctaacatactcatgaactattacaccgggaccgacacccttgtccttacccctaaatcaggcctgactagccagctgcgttcaggcctgatctacgagctgaaccccgcatttgacgaggcgaaggcactggataggggcaaagcttatcaagtagaacgctatactacagtgaaattgcatgatcgatttgtgaagaaccgaaagctgaatgattatcaccacgctcatgacgcttatttgaacgcgtttgtggcccagtatgtttatcaggaacatccagaatggaagaatgcgtgggtgtacggaaagtatcctcgaaacggacaggctgatttcggtaaatgggcaacccagagaaaacagaaatccttgcaactcttatcttccatggcaaatgacgtgtggaatctcgaggaccccgacactatggaaaagacaattttgaaccgagacgagacttttgaacagatgagacaaaccctttgttaccggaatatcaatatagtaaagaaactcgagacgcaaaccgggaagttcggcgacgaatcagtctataagaaagggaacaaggccgaccattactcccttggcctgaaacggaagtatcccccacaaaagtatggcgggaccaaaggggctatctccgcagtaaccgcacttgttaaagataattccggccgcgtcatcccagttagtatttctgcttcagactacgattcctatcaaaacgcgagcgacaaattggcctggttgctcatgaggaagaagaatattgccgagattctggtggcttctcttcctaaatacaccaagtatgaactgccaagcggcgccttaaggctgcttgctagttaccaagaggctcaaagcgcagttgaattgcctatgcttaaccttgggctgatggatgatgaggccaaagttctgaacctgtatgatcaactcgcccaatttattgccgataataaactgtttaccgacaagaagatagccttactcaagggagagatgcgagcggcttttgaccgtttagaagaattcaaagataagcaaaaggtaatagatgaattactcggtgtaactaacggttctaatcaggggttgcaagcattgaattctatcggattgggtacgagtaatcaaagactcaagtcaggcaataccatgactaatggtgttacattgattaacgagagtgtcacgggcctctacctgactagaacaacttataat

SEQ ID NO: 155 - DNA, 3231 bp, synthetic construct
  source 1..3231: mol_type = other DNA
  misc_feature 1..3231: note = human codon optimized LPG10190
atgaagtatagcatcggtctcgacatcggtattgcaagtgttgggtgggcggtgatcaacgaggacatcgaacgcatcgaggacttcggagtgaggatttttgacgccgcagagaacccaaaggatggagcgtcactgtccacccctcgtcgcgaggccagatctacacgcaaaaggcttcgccgtagacgtcatcgcgtcgagcgcatccgccaactgattatccagaaaggccttctgacacaggtccagatggagcagctttatgactggaaggcagaggacctggacatctggctgatccgtgtgaacggactggagcgcaagctgaccgacagggaattcgctcgcgtgctgatccatctcgctaaaaaccgcggcttcaaatccaaccgcaagagcgagctgaaagaaggggataacggcgttgtgctgtccgcggttcaagagaacaagcaattgatggaagagaaaggctaccagaccatcgctgagatgctcctgttcgatgagagatttgatgggtgcaagcgtaacaaagggggtgcttacagccatgtcgtggcccggagcgacttggagcacgagatcaggctcatcttccagaagcagagagaatacggacacgctttcgccaccatcgagaacgaagagggcttcgtgagcatttgggccagtcagaggcctttcgcgaccaaggatgacatcgccaagaaaattggatactgcacgctcgagcccaaggagaagcggacacccaagagtacgtacacctttgagagattccgtgccattgataagttgaaccgcttgagaatcttgtccagcacaatccccagccgccctctcgtacaggaagagcgtgacgatgttctcaacaccctgtttagtaaaaaggaagtaaagtacaaggagctgcgcaaactgcttaagctgaaggatgccgagagattcaacgagatctactatgaccccaacgaaagcaatgaaaaaaacgaaaataggaccttcctgtctctggagagccagcacaagatccgcaccattatcaaacaggtggaaggcaaaaacattaacgactcttaccgccctatcgatctcgacaccttcgcttacgccctgacagtgtttaaggatgaccaagatattagggactatttgcagaaccgttacgtgagcagtaatggcaaaaaggtgctgaacctggctaacctcgagtacaaggaagagctgatcgaagagctgctccagcttagcttcgcaaagtttggccacctgtccctcaaggcgctgaagaacatcctcccttacatggagcagggcatgccctaccatcaggcctgtgcggaggccgggtacgagttcaatcagcgcgtgaacaaggaaaagcagtacttgctgcctgttatccctaccaaggatatcgctaacccagtagtgatccgctccctgtctcaggtccgcaaggttgtgaatggaattatcaaaaagtacggctccccatctgctatctatattgagctggctagggagatgggccgcgtctacaaggagagaaaggaattggaaaagcagtacaataaaaaccgcgaaatcaacgaaggcgccaaaaagcacattgtggagttgcacccgcaactcggagacccccgtggccacgacatcctgaagtacaagctgtggaaggaacaggatggaagatgcgcctactcctttcagcctatctccatcgaacgcctgttccatatcggttatgcggaggtggaccatattatcccctactctcgcagctttgatgactcaaactccaacaaagtgctcgtgatcgcggccgagaatcagaacaagcagaaccgcaccccgtacgagtggtttggtcacaacgagacaaagtggcaggaattcacctctttcgtaacgaccatgaaggtttccaagaaaaagaaaggccttctgttgaaaaaggacctcgatgaggaacaggccgaagagtttcggagtagacatctgaacgacacccgctatattacccgctttattaagaccttcatcgaagataacctcttgttccgtaccgaagagtcccgcaaacagtatgttcatacagtcaacggcgcctacacctccctcatgcgcaagaggtggggtttcaacaagaatcggcaggaaaacgacctgcaccatgctctcgatgccgtgatcattgccgtaagcctgcccttcaaacatcgcgtcagtgcttattttaagaggcgcgaggaatatgctcataaccagctgaagcgggaaggcgaattctttcctgagccttggcctggattcatccatgaactggagatccgtatgatgcaggactccgagaagatgaagctcgccatcgagagtctggacctgaagacatacaacgagtctttcattaacgagctgaagcctatcttcgtcagtcggatgcccaagcgctccatcaaagggcagattcacgaagagaccctcaagcgcgttaggggcctgacagaaacggggtacatcctgacggtcaaaaagacacgccttgatcagatcccgttcgacaagaacggcgactttcctatgttcggcaaagagaccgatatgaagacctacgaagctattaagaacagatacctggaatttggtaagaacaaggaaaaggcgttctctacaccactccacaagccggccaaaaacccgaataacgctccaatcattcgttctgtgaagatcgagaacaagaccaaccgtgtggttatgctggatgacaagacagccgctgataacgcttctatcgtgcgcacagaggttttccggcacaaggagactggcaattatttcctgacccctgtctatgtcgccgatgccctgtcaaagcgggtgccagaccgcctcatcaccccaaagaaaccgtactccgaatggaaacggatcacagatgactacgagttcttgttctctctgtatcctaacgatctcatccgggtgaagatgccccgcgagaaggaagcgaaaacacacgccggtgagaagtgtctgtggcaggagaacttcgtgtacttcaagggcgtggattctgccgacgcccgcatcaaggtcgtggaccatatgaattccttcgaggaccgcgtgggcacccagcggctggtcacctttgagaagtaccaggtagacccgttgggtggaattaacaaggttcacggtgaaaagcgctatggcttc

SEQ ID NO: 156 - DNA, 3183 bp, synthetic construct
  source 1..3183: mol_type = other DNA
  misc_feature 1..3183: note = human codon optimized LPG10191
atgagcaaagtgctgggcctggatatcggcatcagctccgtaggttggggcattatcgattcccagtccggtgagattatcgacgcaggcgtccgcctgttcgaggaagctacccgtaacgccaatgaggacaggcgcaccttcaggggctctagacgtctgaaacgcagacgcacccatcgcctggagcagctgaaacagcttctgactgaagtcggcctgcccctggagtcaatcggggtagaaaatccatacgaggcccgccgtgacgcgatttacggagaggtgactaaggagcgtctggtggcagccatctatcacctggtcaaaaggcgcggcgtcgtgctggatgctccagaggaagagagcaaggtcgtgaacgagctgagcacgaaggaccagctggccaagaacaggaaattgctggaaaccaagtacatctgtgagattcagctcgagcggatcaacgattctcatgagaagatgcgcaatcatgagaacaggtttaggacagctgactacgtgattgaggccaaggctatcctggctaagcaaaaggagttccacgaagagctggccaacgaattcatcgaaaaggtcatcaacctgattgaacggcgcagagaatatttcgacggtcccgggtccgaaaagagcccaaccccttatgggcagtacttcttgaacaagcagggtaagctggagaacgtgtccatgatcaacaaaatgcgcggcaaatgcacctactttccggacgaactgagaattcctaaaatgtcctatacagccgacctctttaatcttctgtctggcgacttgaacaagctgcagatcgaaggcgagtacttgaccgtggaggacaaaaactacatcttggaaaacttcatccacaagggcaagaacattaccctccctcagttgctgaagtacaaaggtgtggactccgatgcagtcgtgacaggctaccgcatggacatgaagactgacaagcctactttcacggactttaagggatataagaacatcctgaagatcgtaaaagaacatgacctgcctattgaccttctgcacaattatgacgtactcgacgaaatcgtcaacattcttaccgcggagaaatcctacacccggagagctgaacagatgaacgagctccttacaatgtattccgacaccgcacgccggaagattgtgactgccttcaaggagtcaaccgacttcgtggggtatcacgctctttcaaaaaaggccatgatgctgatcttgaatgaactgtgggctacaaacaagaaccagatggaactgttttccgagctcaagctcgaagagaagcgcgtgagcggactgactaaaaccaagaacatccaattcgacgatgacgcgattctcagtaccgttgccaaacgtgctcatagagagaccatcaagatcgtcaacgaggcgcgcaaaaagtatggcgagttcgaaaccatcgtagtggagaccgcaagagagaagaactctgatgagaagcgtaagctctatgtagacttccaacgcaatattggcaaactggaaaaaaagatggccgatcttctgagtgtaaaaaacctgaaggacctgaggctgaatggcaagcagcaccttgctctcaagttgtgggacagtcaggatggcaagtgtctgtactccggcaaagcaattagtcttcacgagatcgtaacaaaccctaccttgttcgaaatcgaccatattcttcccatctcactctcattcgacgattcccaggcaaacaaagtgctctgctaccacgccgagaaccagaaaaagggccagcttactcccttccagtatttcatgtccggaaagacaaaccgcagctttgatcagttcaaggtggaggtgctgaacctgtacaagtcccgtaggatcaccaataagaaaaaggactatcttctggagcagcgggatctccagaataacgaagagttgcagaaacaattcatcaatcggaatctcgtggacactcagtacgcgatgcgctccttctccatgtctttgcgcacttacttcaaggccaacagtatcgataccacagtgttgtccatcagaggtagcttcaccgccgcgctgcgtaggagagctcggctcaacaaggacagggacgagtcctatgctcatcacgccatcgacgcacttatcgtggccgctatcggcaagctcccagtcttcgagtttttcaaggagtttggcatggacgaacagggcattatctataacaaggagaccggcgagattctgggcgaggaccagtttttcgagcataagttcatgaagctcctgcgggaccttatgaattacgagagtaacattcgttacagccacaaagtggaccgtaagggaaacaggacaatgtccaaccaaactatttacggaacccgggagaaggatggcgagcgctactatctcggtaagagcgacaacatctaccaactggacaagaacggtgttgcccctttgctgaaacgccttgctaagtcccctgacagcttcctcatcgctgagcataaccctgaactgtttagcttgatcggcaagatcgttaaggagtatcccactgctgacaacccttttaaagcttattacaatgagcatgggtatatcctcaaagatggaaaagttccagtcaagatcttgcgctatagggatcgtaagctcggcgtgcacatgaacatcacggataagtatcctggcgccaaaaacgatgtggtcctgctctctatcaagggcgtccgtgtggacctgtacaaaaacgccgagggaaactataagtatctgggcgtgccatacaactggttcaagcaggtaggaaaccgcctcatgctggatctggaaaaatatgaaaaggagaaaaagcagtcttacaagaaaatcgacgatacatatgagtttcagatgtcactgtacaaaaacgacctgttctccttcgaaaaagggggtaagtacgccgagcgcatcttccgtggcgacagcatgccgcgccaaaacaaggtggaggtggactacgtgtttaaacgcaaggaagagcagaaggagggcttcctggctcccagcacaatcagcaacgtcatcaagtacaacgtggacgtgcttgggaaccgtcacaagatcctcaaggagatctttaacatgtaccttcagaaa

SEQ ID NO: 157 - DNA, 3171 bp, synthetic construct
  source 1..3171: mol_type = other DNA
  misc_feature 1..3171: note = human codon optimized LPG10194
atgtcaaaccgggtaccataccgtctggctctcgatttaggcaccaattcgataggttggtgccttctcgatttaaacggcaacggtgatccgtgtggcgtgcgacgcatgggtgtacggatattcccggacgggagagacccgaaaagtaaggaatcactggcagcggaccgtcgcttggcacggtctatgcggcgtcgtcgcgatcgataccttcggcgacgatcagccttgatgaacgctttggttgcggccggactgatgccagccgaccaggcgggacggaaggcattagagagtgaggatccatacgagttacgtgcgcgagccctcactgaaccgctcaccgcggggcaggtgggtcgagctttatttcaccttaatcagcggcgcgggttcaagtcaaaccgcaaggcggcgggcgaagagaatgaggccggtaaaatcaaggcgggcatctcagcgttgaaagccgagattgaagcttcaggagagacgacattaggagcctggttagccgcgcgtcatcggaagcgagaaactgtccgggcgagactggacggcgctggggcaaaggcaagttatgaattctatccagagcgctcactggtgcatgacgagttccaagcgattcgtactgctcaggctcctcaccacccagacatcaccgcagagcaatgggatcgtatcgagagtgtaattttccgccagcgtccacttcgaccagtaagacccggaaagtgcacgcttttcccagatcaagaaagagctccgtgggcgcttccggtggcgcaagagttccgcatacttacggaagtaggtaatctcaaactgtaccgcccaggggaagaacctcgtgagttatctgcagggcaacacgcgcagttgttcgcgaagttgtgtagatccgctgatttgacgtttgagaagatccggaaggagctgaagcttgaccctggcctgaaggtgaacctcgaaggagagaaacgcgaccgtttgaagggtgacgcagttacaagtgctctctcggccaagaagcgtttcgggcccaagtggaacgcgctgacgccggatgaccgtagagacatcgtcggccgattaatcgaagccgaggacgaagccgagttggccggctggctggagagtgttcatggtctggcatctgaaaacgccgcacatacggcggcgtcaccgggtcttcctgacggctactgtagattatccgagaaggcgctcgtcgaattagtgccattaatgagagagagactgctgcgatatgacgaggcggtacgcgccctggacctgcatcactcggacttccgccccgatgggcttctggacgagttaccttactacggcgagcccctggaaagatttatcgcttttgggagcggcgagccgtcagacccgcctgagcttagattgggccgctttccgaatccgactgttcatatcggcctgaacgagctgcggaagctcgtaaaccggattgtcgagcgatggggcaagcctgccgacattgtcgtagagttagctcgcgatctcaagcgtagccgagatgaacgtgacacgatccagcgtgagcaagcacagaatcaacgtaagaacgaggaccgattcgctaagatcaaggagttaggtattgacccacgtcctgatagcatgttgcgtttgcgcttatgggaagaactgcccaaggttggggtgggtcatgtttgtgtatataccggtgagcctattgggattcgtcgcttgttagagggagacgtcgacattgatcatatacttcctttctccagaacgttatccgacggggcagacaataaaatcgtttgcgtccgtcgtgcaaaccgcttcaagcgcgaccgtagcccgtgggaagccttaggagtgacggccgtggacggttacagctgggcagccatagcggaaagagctgaggagctgcctaagaacaaacggtggcgcttcctgcctgatgctatggatcgcttcgagggcgagcgcggtttccttgaccggcaattagtcgagacccgacacctttcgcgcgtagctcgccaatatcttgcttcaattgtagaactcaataaggttcgtgttgcccctggcaagttgaccgcgatgttacgggcccgttggggtctgaataagatcttaagtgacggaaacttaaagaatagatcagaccaccgacaccatgcgattgacgcggcagtacttggggtaatagaccagcggctggttcaactggtggctcaagcggcagcacgcgccgaagctaatgagcttgagcgcctgtttgacggcctgccagaccctttcgatggattagcggcgatgagtttcggcgaccaagtacgtgagaaaatacgtgggataacagtatcccaccgtgctgagcacggttggcaaggtcgcatgcacaacgacacggcttacggcccggtcgaggctgtgaacggcgtacatacggtcgtaactcggaagccgctcagcggtcttacggccaaagaatttccaaatatccgcgaccgagtgctcgcaaaggctctcgaagatcacgtggcggcagaggccgcggctggtcggggtttcggagatgctttgggttcgtttgaatggggtggacaaccggtccggcgagtccgcatgctggatgtcctgggtaatccaatacccatacaagatccttctggaaccgtcttcaaggtctataaaggggactctaacgcatggtacgagatcttgcgggacccccgcggtagatggactgggaagattgtgtcaaccttcgaggcgtaccgactccacagagaatggctcgccgagactggcggggattcgggtcgtggtggtggcgttttccttgactgggcggcgaaacgcgttgcgggtgaggcaggaactcctcttttccggttatttaagggcgatttacttgcgttaggagaggcaccagatcgtcgcattgtgagagtagtgaaattttcggaaggtcaagtggcgctcgcccttcatttagaggccggcaacttgaaagcgcgtgacgcggataaaggcgatccattcaaataccaatactgcagcccagattcgttgcgcaaacaagccgcgcgaccggctggggtagacctgctcggttatgtccacgataagggtccactggag

SEQ ID NO: 158 - DNA, 4059 bp, synthetic construct
  source 1..4059: mol_type = other DNA
  misc_feature 1..4059: note = human codon optimized LPG10195
atgcgtaagaaccaggagccgtataatattgggctcgacataggtacatcttccatagggtggtcaatcatgaacgacaactttgatttaatgcgtgtgaaaggtaagaaggggataggcgtgcgcttatacaacgaaggtcaatctgcggctgagcgcagaatgcatagaaccgcccgcagaagatatggtcgacggaagtggcgattacgtttgttagaagatttctttgatgagcacatggcggaagttgatgacacgttcttcgcgcgtcttaaggactcctctatcagtccgaaggatgacaagaagtaccgcaagtcgctccttttcccgaagagcaagggtctgacttaccaagacgacggtgaattttacaagaaatatcctacaatgtatcatttacggtacgcccttatgacggaacaccgcaagttcgaccttcgtgaaatatatctcgcattccatcacatggtgaagtaccgtggaaacttcttatacgacacgagcgttgacagttttgaagctaagaacttggatatcaaaggtaagtttgatgagataaatgacctcttatcttcgtacacggacttctatgttgacaactcaaacgcagcattggttgagagcatcctcttagaaaagaatacgacaagaaaggataaggccaagaagatagccaagttattacatgtggaagataaagagaaagtcaagaacaagaaagctaaggaccttgccacacagatatccaacgctgtgcttggtctgaagtgtaatttccatcttatatttgaactccaacaaaagtacagtttcgacctgtgtagcgagaaaaccgaggaaaatattgcgaatttgagtgaggtgctcgacgagaaccagaagatgcttttaatgatacttaaagagattcaagatcaagtcatgcttaacgctttcgtaccttctggtatgagcttatccgaagcaatgatgcaaaagtacgacgcttatggtgagcaactgaagatctaccacgaacttgagcactctgtgtcggatgattcagcagccgagttgcggggtgcgtactgtgattacaacgacaatattgcaaagcgcgacgaattctacaataagttgaagaaaatcctgtcggacatggacaaggagaacgttgaacaagacgttctcgaatcctgcgggaagctgaagaagttgattgatgaaaacaagttgttcatacgccaacgcacagcggcgaatggggtcttgccgcaccagctgcatcagatcgagatgcgtaagatcattgacaatcaaaaggaatactacccctggctggcagaaccgaaccctaacgagaagcgacgtgtatactcaaagtataaggtggaagaattaatagcattccggatcccttactatgtgggcccgctggtggacccaaataatgcagacaagaacaaggaagcccggttctcgtggatggtgcgcaagaaggacggcgagataaccccttggaacttcgacgacaaagtagaccgcgctgagtccgcgaacaatttcattaagagaatgaaatcaaaagacacgtacctgttaggtgaggacgtcgtgccaaaggagtccatgctctaccaaaagtatgaggtgttaaacgaactgaacaatctccgtataaacgacagcgggttaagcgacagttttgaggatgtgaagttaaagcaagctatatacaacgatctgtttaagaagcaaaagatagtcaagattacagacctgcaaaattatctcgtccaaaatcacaagtacttagtcaagcccaagataagcggactggcagatgagaaccgcttcctgagttcattatccacgtactctgacctgaagacaatcttcggggataaggtagacgaccgcacctattttaacgactttgagaagatggttgagtacagcactgttttcgaggacggtcatgtctataagcaaaagctggacgaatttacgtggttgacgaaggaagagaaagataagattggcaagaagcgttatcgtggctggggcaagctgagtaagaaactgctgactggtcttcgggacaagaacaatcacactataatggacaacttgtgggagacgaaccgcaattttatgcaaatacaaacagcggacgagttccctaaacagatctctgaggagaatgagcgtcatttaaaaggatcggtttcggacgctataaacgacatgtacacttctcctgcgaacaagaaggctattcgtcaagtgcttcgagtagttgacgacatacagaaggcaatgggttacgcgcctagcagcattagccttgagtttgcgcgtgaggatggccccagtgttcgtacagttagcagagccaaccggatgaaaagcatctacgagaagtacgcttcagaggtctcagaagaagtaatgaaggatttggacggagttataaaagataagaaaggcttgaacgaccgtctgtacctttactttgagcagcaaggcaaggacatgtacagcgggcacccgttggattttgacaaagttatttcgggccaagaatacgacatagaccatatcttgcctcaagccgttatcaaggacgacagtctcgacaatcgtgtgctcacaacgaaggcgttgaataacgatgtaaagtccaagggagtaccttgtcgtatgtttaacggcatgcattctttctggaagaacttatatgacaaaggatttatctcgcgccgcaaattcaataatttaactactaacccggagaacatcgataagtataaaatgaagggttttgtgaatcgccaacttgttgaaacccgccagataattaaacttgtggcgaacgtcttgaacgataagtatcaaaacgatgacgtagacattatcgaggtccgtgcagaattgacgcatgatgttagaaagcacttcaagttctacaagaatcggaacgttaacgattaccaccatgcttttgatgcgtacttaactaatttcgtcggccagtacctgttcaagaagtacccgaacctgcgacctttatttgactacaacgattttatgaaggttagcgataatgtgtttaagcaattaagaggcaacaatttcttaggggagttcctgaataaaacaggtgacatcatttctacggatggcaatttcgtcctgaacaaagaggaaatgatcaacaagctcaacaaggcctatgcattcaagaagatattagtaaccaaagaagtagtacaacgcacaggcgctatgtttgacgaaacagtctacagcgcaaagagcggaaagaccctgattaagttgaagaaggatcgggacacatccatttacggcgggcactcaggcaacaaggatgcatacatggtgatagtgtacaccggcaaggggtacaaagtaataggtatacccgtgcggtacgctgaacgtttagattctttgcgcaagaacgatgtcgacggattcaatgacatgcttaaccggttgatcgagtccaagttttctaagaagagtaagaacaagcaattcagaattgtgattgataaggttctctacaaccagcttattcaagatggcaatttactgttcacactgggttccgcggcgtaccaacacaacttccggcaactgttccttgataagaaggcgttggagattctcgacaaggtagccacaccgaagcccacagatgacgatctgattatggtttacgatcagatcttggaacgcgtggacaaatacttcgagttgtatgacaacggtggttgtcgcgaagctctgcacaagggacgtgaactgttctgtaagcttccggtttcaaagcgtaacgagaaggacgtgacaaagagagacatgatctacacaatcctggacgggctgcatgcaaacggtaagacggttagttgcttagagattggtaagggcggagcctttggcaagtttcagaagcaaaatggcataaacttgagtgagaacgcaaagcttatataccaaagtccgactgggctgttcgagagagtcgtgtacctgaaggacctg

SEQ ID NO: 159 - DNA, 3453 bp, synthetic construct
  source 1..3453: mol_type = other DNA
  misc_feature 1..3453: note = human codon optimized LPG10196
atgcaaattgatgcccaccaatcctgcgacatgcaaaatgacaagccttacgtcattggctttgacttgggcgacttctcggttggcatgtctgccatccaaatcgactctgaggggttacctacacgcatcctcaactcgcagtctgtcatccacgattctggcattgacccatctcagcgtaagtacgggacatcgcggaagaaggaagctggcatagcccgtcggattcgccgcatgcgtagatatcgcaagcatcggctcaataagttatcacagatcttatctactaacggatacaagcgtatgaacatccgtcagtttcatggtccagacatctggcttatacgcgcgtccgccgcagatcagtacatcgcagacgaggatgctcgtcgcaccgccattcgtgtttcatgtgagcacatcgcaagacacagaggctggagaaacccttaccagaatcctagagtcctgctccatgcccaacccgactcggctacttacgagcagctgcgcgagaacgctgctgatcacatgggtggagtaatgccggccgacaacgaaacaccagctcaaatcgtacgagacgttttagattaccatagaggagagcccgctatccgcttgcgacacaccggtaaggttacgcggaaaactaagaagaatcaacacacgccttgtgcgtgggtacttcctgagcgcatgatgcaatcagataacgcttacgaacttcgccggatactcgaaacacaacaagttccagaaccattgatagagcaattgatcctggcggttttctaccagatcagtccgaaggggtcagcggagcatcttgctgggaaagacgccattgacccgacgcgagtccgtgcgccaaagtgttcgttagcattccaaagatatcgcatagctgacgtgatatcaaatctccgtgtggggattgaacagcggcgcctcaccgtcgaggaaaagcaggcaatcgcacgactgcttgcgagtgataacaagcagacgtgtgagtacgaaacctgggcggctgtggctgaaacactcggacacccggcgacctggcttaagggcattggtgaaccggcacccgacggggaaggaaatgttacgaaccggccgcctcacatcgacatattacaccgaattagtcaattggacgataacaccttgcgagtaactctgttaaattggtgggattctcacacgacagaggacaaggaatcgttcatacgtgtactgagcaacacagttaatattgagactgtcgcggatgaccctgcctacaaggcggccttacaactcctggacggtttagatgacacgcagttaaataagctcgatgcgatgaacctcgaatcaggacgtgccgcttactcggaaaacacattaaataagttagccgactggatgttaacacacgaaggtgacgtgactgatgcacgggagcaagtctttcacattgcgcgagattggagaccaccgcaagagccggttggcgcacccttaggcaatccaccagtagatagatcattaaagatcgcagcgcggtggttggacgcaatcgagcaacgctatgggaagcctatttcggtacaggtagagcatacaagaaaagcttttactagcgtcgagacacgtatgaagaatcaaaaggagtggcaggacagctcaagatgtaaggctcgccaagcacttcgagagcaactcgctaagcaaggcggctcaatttccgaaaactctttaatgagacgcgaggcaataacacgccaaaatggtgaatgcctgtactgtggtgcgtcaatagatataacaacctgccagatggatcatatcgtgccacggaagggctccggttgcaccaatacgaaggataaccttgtcgcggtctgtccaacgtgcaaccaagagaagagcaacatgccattcccagcttattgtgcaacagagagtgcccgtatgcggggcgtctctatgaaggacgctattcatcgtgtacaccatcttaatcttgacgaccaaggctataagtcgaaggcccagaaggctctgaaggatggtataatacgcagattaaaacaaaccgaggcagacgaccccatcgacggtcgcagtctggagtcgacctcatggatggctgtcgagttatacaaacgtctgacctggcgctacgctcataatggtgggacaccagtgaccgttaacgtttatcgtggcgaacttaccgccgaggcgcggtctatcatgcgccatgctgcgggcatggactttcacatgattggcggccacggtaagactcgccttgatcgcagacatcatgctatagacgcgagtgttatagcaatgatgacgccggccgctgcccaagcaattgcggcgagaatttctatgcacgaggcagagacccttaccggcatgcgtactgactggagaacatatccggcgaatcctacagcaaaataccaacactggttagaatcaatgagacgcctcatgaatcttctgaataccgccttagacgacgaccgtattcgtgtgcttcggaatcaacgttatcgcctcgggagctcagcagcacataaggacacgataacgccgcttacctaccgagagctgggtgacccgctcgatgcaagtctgatccggcacgcaagtacgccagccctgtacaccgccctcacgcacctgccagattataacgacgcagatggtctccctgcgaatccagagcgacgaatcaacgtaaatggtacaattatagattcagacgatactatagctttcttcacgggcgacgcagcccaaatactggtaaacgatggcggcgctgcggttggctcgtcaatccatcatgcaagagtctaccgctactacactctgcttaagtccggcaagcgcaagtacgcatacggctggattcgtgtctatcaacaagacctgatccatgctcacggcgatctgtttacggagccgcttaccgcttgcactttatcgttgagatacgccgatcagaccctggttagcgccatacgagacggcagagccgaatacttgggtcacctgctcgccggcgacgagatcgtcgtagactttacagatggtaagggcgccgtgggcaagtttaatgaattcttcgctaaagacatccgtgaacaaccaagcgcgatgcgtcgctggacagttacgggcttcccaactctggttcaaactagcttgcgcccgtgttacctttccggtgaaggtctggcgaaattagaagagcgcggcggagagccggtccctaaggaagttgagaagattttagcaggtagtggcggttacactccgtccgtgaataccgtgttctctttacaccctgccatcattcacagaaatgtatttggtgaagaacgttggggtacggtctcgggtttacccaccagttggcgggtaaacgacacccagaag

SEQ ID NO: 160 - DNA, 4146 bp, synthetic construct
  source 1..4146: mol_type = other DNA
  misc_feature 1..4146: note = human codon optimized LPG10197
atgataaagaaggactataacctgggtctggacatcggggcgacttccgtagggtttgcaggaatcgacgaacaatacgaccccatcaagctgaagggtaagacagtagtcggtgtaaatttattcgaggaaggcaagaccgccgcagatcgtcgaggattccgaaccactcgacgtagactttctcggagaaagtggcgcctgagcttactcgaagagttcttcgacccgtacattaccccagtagacccgacattctttgcgcgcttaaaggaaagtaacctgtcaccaaaggataacaataagaacttcagcggtagcctgttgttttctgatattacagaccagaagttctacgaagaatatccgactatttatcatttgcgctatgctcttatgacggagaataagaagttcgacttgcgcgcgatctttctggccatccatcacatgataaagtaccgcggtaactttcttaactccactcccgtcgcacactttgacacgtcaaagattaacttcgcttcagacctgaatgagctgaattcgctttacttaaacgaggacccaaataacatcttcgagattaatctgcagaacgttaaagagatttcagatattctgctggatcactcaattaagaagtttgacaagcaaaagcaagtggctaaactcctgttgacttcccaaaacgataaggaacttgacaaaattaataagcaaatcgcaacccaaatcagcaaggcgatactcggttacaacttctcacttaacgagattctgaaaatagaggttgaggataagagcaagtggaagttgaacttttcaagcgctgacatcgacgataaattaccagacttaatttctgaactcgacgagtcccaagagtcaattcttaacatcattctttcactgtattctcgacttaccttgaatggaatcgtcccgagcgggatgagcctcagtgaggcgatgatagataaatatggcactcacaaggagcacctggacttattgaagaagtatttaaagaccctgccgatcaagaatcgaaaagagatcgctgaagcctacgcagagtacgtgggtaactctctgaagaaatcgggtcatatcagtcaagaggagttctacaaggcagttaagaagaatttagataaatcggagaccgctcaagccattcttggtctcatctccgaggaaaagttcatgccaaagcaacgtaccaatcaaaatggtgtcattccctatcaactgcaccagaaagagcttgaccagatcatcgtgaaccaaagtcagtattacccgtggctggccgagttaaatcccgtaacggagcataaggatgcaaagtacaagttagatgaacttatcgcattccgtgtaccttactatgtgggtcccctgatcgacccgaaaactacaccccaaacagaacaaggcaacaagaacgccagcttcgcttggatggttagaaaggaaaatggtcagataactccttggaacttcgacaagaaggtggaccgaatttcatcggcgaacaactttattaaacgaatgaccaccaaggacacctacttaattggggaagatgtgttacccgcacactctctgatctatgagcgctttaaggtgttaaacgaactgaacatgatcagagtaaacggtaagaagctgagtgtaagtgtcaagcaaaatctctataacgacttattcaagcaacagaagactataaacagaaagaaattggctaattacttgcaagcaaacttgggaataccggaaagaccccagatcaccggccttagcgaccccgagaagttcaatagccaactttctagctacatcgatcttcagaagatccttggaagcgagatagtggacgacccgaataagcaagacgatctggaaaagatcatcgaatggagcacagtcttcgaggattcccggatctataaggtgaagcttcaagagattggatggcttactgagaagcaaaagaacgaactcgtttctcaccggtatcagggctggggccgcctgagtagaaaactcctggttgagttgaaggataagaacggtcggtctattctcgacatcctttggaactcacagcgtacgttcatggaaattcagtcacgacctgaatttgccgagcaaattactaatgagaaccaggataaactgaccgaggacaactacgaggacgtcctggaagatgcgtatacgtcacctcaaaacaagaaggcgattcgacaggtaataaaggttgtagacgacatagtgaaggctgctggtaaagctccgaaattcatatctctcgaatttgccagatcggatgagagatcagaccgtgttaagagtcgtaaaacgcaaatccagaaaatctacgaaaccacagctaaggaattgctgaaggatgaccaattaataaaggagctgggctccgtttcagacctttctgaccgtctctacttatactttacacagctgggccgtgacatgtatacgggcaagccgatcaacatagacgaaattagcacgatgtacgacatagaccacattctgccacaagccttccttaaggatgactcccttgacaaccgtgtactggtccgtcgccaagacaataacgcgaagtctgacacagttccagccttaaagttcggtaagatgaaaccgttttggaacaagcttcaaaagcacggattaatcagtaaacgtaagctcaacaatttacagacaaacccagagtccatagacaagtttaaggcagtttcgttcgttaaccggcagttggttgagacccgtcaagtgataaagttagcagccaatatcctcgccagccggtaccccgattctaagataattgaagtgaaggcttccttgacacatcagatgagagaaagttttaacttaataaagaaccgggacgttaatgattatcatcacgcagtggacgcgtacctgtccgcctttgtggggcaatacctgtacaaccgatatccgaagctccaaccgtattttgtgtatgggcaattcaagaagttcgacaaacaatcaacccgtattggtatgaaaaccaaccattttaactttctctatgatttggagcctgaaggaaagaacgtgaaaattaagaagccgacaaagataatcaacaaggaaacgggtgagattattggagacagagatgaactggttgccaagcttaatcgggtgtacaacttcaagtacatgctgatctcccaagaggtttacacgagaagcggagctttattcgatcaaactatataccctgcgaactctgggaagaagctgatcccgttgaagcaaaacaaaaccacagctatatacggcggctactctggaagcaaggccgcttatatgtctatcatacgcttgcgggacaagaagggcgggacctatcgaatcgttggcatccctgtaagagccgtaaataagctcaaccaggctaagaagaaatcgaacgaaaagtatcttgcggagttaaaggctgttattgagcctcaaattgccaagacgaagaaggacagaaagacaggccaacgggtattagttcctcaggaattcgatgtcattatcccggaagtgatgtatcgccaactgatcgtagacggcgaccaaaagttcacattgggctctagcacctaccaatacaatgcacgacaattggtgttggatagcgagagtttagttaccttgagtaagaatttcatcgagtcgaacagtgttacttccgagatcaagaataacagattaattaaggtctacgacgatatccttgacaaagttaacaagtatttctctctttacgacaagaacaagttccggcaacggcttaacgagggacgagagaaattcattagacttcctatcgacagcaagttcaagaacaataagaagatcgctgtcggtaagcgggagattctgcaaaacattttgataggtttacacgacaacgcgggaatggggaatcttaaagtccttggaataaatacgcccttcggtatgattcaaactagtaacggcattactcttagccctaacgcttgtctgatttatcaaagccctacgggccttttcgagcgcaaagtatacttaaatacaataagttcactgaag

SEQ ID NO: 161 - DNA, 3276 bp, synthetic construct
  source 1..3276: mol_type = other DNA
  misc_feature 1..3276: note = human codon optimized LPG10198
atggcttacactatgggaatagacgttggaattgcaagctgtgggtgggcaatagtcgacttagagcggcagcgtataatcgacttaggagtacgtatcttcgagaaggctgaaaatccgaagaacggcgaagcactggcagttcccagaagagaggctcggagttcccggcgtcgcctgagacgtaagaagcatcggatagagcggctgaagtacatgttcatacgcaatggattagcggtagatatccaacacctggagcaaactctccgttctcagaacgagatcgacgtttggcaactccgggtggatggcttggatcgtgttcttacccaaaaggaatggttacgggttcttattcacttagcccagcgcagagggttccagagtaatcgcaagacagacggttctaatgaggacggccaggttctggtcaacgttacggagaacgagaagctgatggaagagaaggactatagaaccgtagccgaaatgatggtgaaggacggcaagttcagtgaccacaagcgtaataagaatgggaactatcacggggtggtgtcgcgtgcgagcttacttgtcgagattcatacccttttcgagtcgcaacggcagcaccataacttcttcgccagtaaagatttcgaattggagtacgtgaacatttggagttcgcaacgcccagtcgccactaaggaccaaatagagaagatgattggcacgtgtacattcctgccgaaggagaagcgtgctccgaaggcttcttggcatttccaatatttcatgcttttgcaaaccataaatcacattcgtattacgaatgtacaagtcacacgcagcctcaataaggaagaaatcgaacaagtagtgaacatggcattaactaaatcgaaggtgtcataccacgacatacgtaagatcctggacttatccgaagaataccaattcgtggggctggattacggcaaagacgacgagaagaagaaggttgagtccaaagagaccattataaagttagacgactaccacaaacttaacaagattttcaatgaagtcgaacttgcaaaaggcgaggcttgggaagctgtagactatgatacggtggcctacgcgctgactttcttcaaggacgatgaggacatacgtgactacttgcaaaacaaatataaggactcgaagaaccgtctcgtcaagaatttgagtaacaaggagtacactaacgagctcatcgaaaaggtaagcaccctttcgttccgtaaggtcgggcatttatctcttaaggcgcttcggaagattattccattcttggagcaaagtatgacttacgacaaagcgtgtcaagcagcaggcttcaattttcagggtatcagtaagaagaaacgctccgtgatccttcctgttatcgatcagataagtaaccctgtcgttaatcgcgcattaacacagacgcggaaggtaattaacgccctgataaagaaatacggaagtccagaaacgatccacatcgagaccgccagagagcttagtaagacgtttgacgagcggaagaacataacaaaagactataaagagaaccgggacaagaatgagcgcgcaaagaagcacctttcggaattgggtattattaacccgaccggcttggacattgttaagtacaagctgtggagcgagcaacaggggcgctgcatatactccaatcagccaatatcattcgagagactgaaggagtccggatataccgaagtagaccacattattccatatagccgcagtatgaacgactcctataacaaccgtgtacttgtgatgacgcgtgagaatcgtgagaagagtaaccaaacaccttacgaatatatgggcaatgacacgcagcgatggcacgagtttgagcaacgagtgacgactaatctgcaaataaagaaggagaagcgtcaaaaccttctgcttaagggttttacaaaccgccgtgaattagaaatgttagagcggaatttaaacgacacccgatacattactaaatacttatctcatttcatctccacgaacttggaatttagtccaagcgacaagaagaagaaggtggtgaataccagtggtagaattacatcccacttacgttctcgctggggtctggagaagaatcgcgagcaaaacgatctccatcatgcaatggacgcagttgtcatcgcagttacgtccgattcgttcatccagcaggtaaccaactactacaagcgcaaggagagaagagaacttaatggcgacgacaaattccctctcccgtggaagttcttccgggaagaggttattgctcgcttatcgccgaatcccaaggagcaaatagaagccttgccaaaccatttctactctgaggatgaattagccgatctgcagcccatatttgtttcccgtatgccaaagcggtcaattacgggcgaggcgcaccaagcgcagttccgccgtgtcgttggcaagaccaaggaagggaagaatataaccgccaagaaaactgctttggttgacatttcttatgacaagaacggtgatttcaacatgtacggcaaagagactgatccagctacgtacgaggccattaaggaacgctaccttgagtttggcggtaatgctaagaaggcgttcagcacggatctgcacaaacccaagaaagacggcaccaagggccctcttatcaagtctgtgcgcatcatggaaaataaaactttagttcacccggtcaataaggggaagggtgtcgtctacaattcgagtatcgtacgaactgatgtgttccagcgcaaggagaagtactacttgcttccggtctacgtgaccgatgtgacgaagggtaagcttccgaataaggtaatagtcgcaaagaagggttatgacgactggattgaggtcgacgacagcttcactttcttattttcactgtacccgaacgacataatattcatccgtcaaaatccgaagaagaaaatctcattaaagaagcgcatcgagtcacatagtatatcggactccaaagaggtgcaggaaattcatgcatactacaaaggtgtcgacagtagcacagctgctatcgaattcataacgcatgacggctcttactacgctaagggtgtgggtgttcagaaccttgactgttttgaaaagtaccaagttgacattcttgggaactactttaaagtaaaaggggaaaagcgactggagctggagacctcagacagcaaccacaaaggtaaagacgttaatagcattaagtctactagtcgt

SEQ ID NO: 162 - DNA, 3258 bp, synthetic construct
  source 1..3258: mol_type = other DNA
  misc_feature 1..3258: note = human codon optimized LPG10200
atgccattccgtcaacctgtatcttacgcatttgacatgggtacgaactcgattggctggtgcgtgtttcgtttgtcggccgctggtcatccggtggctatcgccgacgccggcgttagaatctattcggacgggagagacccccaaagtaagacatcactggctgtagcccggcgcgaggccaaagcagcggctcggcggcgcgacagaacaaaacgacgtcaaaaggcgacacttcgtactttagctgagtacggtcttatgccgggcggcaaagacgagcgtgagcggttacttcgcgagactgcggacagcgcggatcggaatgctcccgctaacgatcctttaaatctccgggcccgcgcattgacagagaagcttccattgcaccatatcggtcgtgccttatttcacctggggcagcggcgtggattcaagagtaatagaaagactgaccggcgcgataatgataaaggcaagattgcgattggaatcgaccggttacgtgacgccatccgcgaagcgaaggcagagaccctgggcgttttcctggcgtcgcgtcgagcgcagggattacatgtccggttgagagctggctctagtgtcatcctggatgacggctatgacttttatccggttcgatctttactggaagaggagttccgccacatctgggacgcgcaggcagttcattacccggacgtacttacagaggctcggggcgagcacttgtttaaggttattttccaccagcggccactgaagaaaccccgaatcggatcatgtacgttcaacccgttggagcaacgactggccaaggctcatccgttattccaggctttccggctgtacaaagaggtaaatgagttagaggttgttgcgccggacctgagtcaacgcaaattgactttggatgaacgtgacgcactggtcctgaagctccgtggggctaagaccgctaaatacaagactttgcggaaggacctcaaacttacccctgatatgcgcttcaacaaggaatctgaaaaccgggtcgacatggcgggtgatgaagtaaccgcagcacttagtgccaaaggattgtttggcccacgttggaacacactttcgatggactcccaatggaaggtcatcgagagaatacaggaagaggagaatccatttgtattgcatcaatggctcgtcgagacacacggtctgtccgatgatgcggctgaggcggtggccgcttgccaccttcctgaggggtatggacgtcttggtcatacggccctgtcgacgatgttagaggaattgcgtgctgatgtcatcccagaggctaaggcggctgaacgggccggctacaaccacagttactttggcacgggtgaaatcttcgacgagctgccaaagtaccaagaggttgtcgcccgttctataccgccgggaaccggggatcttgaggatgagtacgacgtacgtaagggcagaatcaccaacccgaccgtacacataggcttaaatcaattacaaagactcgtaaacggacttattcggcgctttggcaagccagctgagatcgccgttgaactcgctcgtgatctgaagacgaacgagaagaagaaaaccgaaatcaacagacgcataggcgaaaatacgcgtgcagctcgccaacgttcagagaagattgctgagttgcgcaaggacaccccggcacttgtagacaatggttataacagattacttctgaaactctgggaagagttaaaccccgcgaaacctgaagaccgctgctgcatatacaccggaaaaccgatatccataagcatgctgttcagcggggcagtggatgtggaccatatccttccgtatagcagaacgttagatgatgggcaaggaaataaactcttatgtctgaaagaggcaaatcgcgttaaaagaaaccgggcaccaagtgaagtaactgagtgggctaatcattacgacgaaattctcgaacgtgcgaaccgcctgcccaagcccaagagatggcgctttgcgcgggacgttatggccgattttgatgctgattctggtttccttgaccgtcaactgaccgatacacaatatttatctcggttggcgcgagaatatttgtgcagtctgtatccagaaaagcatgagcaatggagagtgcgggtgatccctggacgcatgacagaaatgttgcgcagacattggggcttaaacactctgttgccggaccacaactactcagatgcgaagaatcgcaacgatcaccggcaccatgccatcgacgctgctgtagtcggtgtgactacccgttctatgttgcaacgcatctccactgaggctgcgcgaagagaggaacaagaactcgaagatgtagtaaagggtatcccggtcccttgggagcactttcgtgacgacttacaacaggctctgaacaacatagttgtctcccataaacctgaccatggaactgtcgggttagacgacaagggcaagtggcagacggcgggtaagctgcacaatgacaccgcgtacggcctgactggagaggtggacgcccggggcaacacaattgtcgtccgtcgaaagatgttattatcattaaccgataaggatatcccagcaatacgcgatgatgagcttcgggctagactgtattctgcggccggtggcttatcaggaaaggagctgcaacaagccctgctggactttgcccggaatgaccccaagtatcggggtattcggcgggttcgggtcacagagacactggcagttattccaattcgggacaaggatggaaatgtctacaaaggttacaaaggagacgccaactatagatacgacgtctgggagatgaaagacggcaagtggcaagcagaagtgataagcatgttcgacgcccaccagaaaggctgggaatcaccggtgcgaaaggctaacccaactgcacgcaaagttttaagtttgcaacaaaacgatatggtagcgtacgagcacccaagcgacgggtatacaattgcgcgcgtagttaaattcgcctcgtctggccaaatcgtgttcgcgcggaacaacgagggtggatcacttaaagcccgtgacgctaaccgtgatgacccatttaaatacttcagtaagaccgctaacggcttacgcgagatcaaggctcgtcaaatacgaatcgacgagactgggagagtatacgacccgggaccgcgagaccgcgagagtcggatgataggcaaccaaaagctcaaaacaattgcaata

SEQ ID NO: 163 - DNA, 3228 bp, synthetic construct
  source 1..3228: mol_type = other DNA
  misc_feature 1..3228: note = human codon optimized LPG10203
atgaagtactctattggccttgatatagggatagcatccgttggatgggcggttattaatgaggacctgggacgtatcgagaacatgggtgtgagaattttcgatgccgccgaacacccaaaagatggttcctcgctgtcgactccacgtcgcgaggcacggagcgcgagaaagagattgcgccgcagacggcatcgggttgaacggaccagatactttatgattcaaaaggggttgcttactcaggtccaaatggagcaactgtacgactggaagcatggagacttagacatctggttaattcgggtaaacgcactggaacgcaagctgacaaaccgtgaattcgcccgagtattaattcaccatactaagaatcgcggcttcaagagtaatcgtaagtcggagctgaaggaaggtgacaatggggttgtgttatccgctgtgcaagagaacaaacgtttgatggaagaaaaggggtaccaaaccatcgcagagatgctgctgttggatactaagttcaaaggcctgaaaagaaacaagggcggtgactactctcacgttgtagcgcgaagtgaacttgagcacgagatccgtttggttttcgcgaagcaacgtgagttcggacatcgtttcgcttcggtggagaatgaggaaggttacatcgcaatatggtcttctcagagaccatttgccactaaggacgacatctcgaagaagatcggctattgtaccctggaaccaaaggaacgtcgcgcacccaaaagcacctacactttcgagcgcttccgggccttagataagcttgcacgtcttagaatcctgtcatctacgaaggagaaccgggcgctgactgacgacgaacgtgagttgatactcaattccctcttctccaagaaagaaatgaagtacaaggaactgcgcaagcttttgaagcttcaagacactgatcgttttaacgaaatattttatgacccagaggctaccgcagacaagaatgagaaccgcactttcttgagtctggaaagtcaatacaaaatacggagcataatacaacaagttgagggtaagaagatcaacgacagctaccgccccattgacttcgacactattgcgtacgctcttactgtgttcaaggatgaccaagacatccgcgactaccttctgaacgactatgtagagagtaacggaaagagaacaaccaatctcgctaatcgggtctacaaggaagaggttattgaggagttacttcaactttcgttcgcaaagtttggccatctgagcttgaaggcattgaagaatatcttagtacacatggagcagggcctgccgtactacaaagcttgcgaagaggcggggtaccagttcaactctaaccagaataaggataagcagcgtattttgcctgtaattccagccaaggaaatcgcaaatccagttgttgtacgttctttgtcccaagttcgtaaggtggtaaacgggataatcaagaagtacaacataccaagcgccatgtacattgagctcgctagagatatgggacgggtatacaaggagcgacgtgacatcgagaagcaatatgacaagaaccgtcagatcaatgaggcggcaaaagagcggatcatagaatattccgaaggcagatttacgccaaaagcacacgacatactcaagtataagctttggcaggagcagggtgggcgttgcgcctattcatttgcccctatcccaattgagtcgttgttcaacataggctatgtggaagtggaccatatcatcccgtacagtcgatcatttgatgactcgaacaataacaaggtcctggtcctgtccgcagagaaccaaaacaaacgtaaccaaacaccgttcgaatactttggccatgacgtagttaagtgggagcaatttaagtcgttcgtcaccacacttaaagtcgcgaagcgtaagaagatgctgctcctgaaacaaaatttcgacgaacaacaagccgaggagttcagatctcgcaacttaaacgacacgagatacatcacacggttcataaagaactttatcgaggacaacttgcaattccgcgaagaggaaggtaacaagcagcacgtgtttacccttaacggtgcgtacacgtccctgatgcgaaaacgttggggcttcaacaagaatcgccgtgagaacgacctgcatcatgcgttggacgcggttctgattgcggtttcctggcccttcaagcaccaggtgagcgcatacttcaaccggcgtgaagagtatgcgcgtaatcaactgaagcgcgaaggtgagtacttccctgagccctggccaggattcatccatgagctggagatacgtatgatgcaggacgaagacaagatgaagcttgcactggaatcattagacctgaagacgtacgacgatgacttcatcaaccgggtaaagcccattttcgtctcacgtatgccgaagcgctctatcaaggggcaaatccatgaagcgacgctgaagcgtgtgcgaggcaatacagaggacggttatattcgtacagtgaagaaggttagattggaccaaattccttttgaaaagaacgggaattttcccatgtatggaaaggaaactgacctgaagacttattcagctatcaagaagcggttccttgaatacggtgaccgtaagaaggcattcgctacgccgctgtacaaacctgccaaggatcccagtaaagctcccattatacgttctgttaagatcgaggaaaaggcgaatcgtgttgtacacttagacgagaagacagtagcggacaatgcgtctatcgccaagacggaagtgttccgacatcgcaagacaggacaatactatctgactccaatctacgtcgccgacgtggtgaacggcatcatcccggaccgtctgatttcaacaaagaagccatactccgaatggcgaagaatcacggacgagtacgaattcctgttttctctgtacccaaatgatcttatccgcatcaaaatgcccaaagagaaggagacgaagaatttcatgaaggagacccacatttggcaggaaggtttcatgtattaccgtggcgtacactctggctctgccggcgtacggatgattaaccacatgaactcttttgaagacgagataggagttcaaaagttggagttattcgagaagtatcaagtggatccgttaggtggtataacgaaggttcatggagaaaagcgctatggaata

SEQ ID NO: 164 - DNA, 3231 bp, synthetic construct
  source 1..3231: mol_type = other DNA
  misc_feature 1..3231: note = human codon optimized LPG10204
atgaagtacagtatcggcttagacattgggattgctagcgtagggtgggcagttataaatgaagaggtcaaccgcattgaaaaccttggggtacggattttcgacgtagcggaaaaccctaaagatggaagctctttggcgacgccgcgccgagaagctcggtcagcccgtaagagactgcggcgacggcgtcatcgcatagagcgtactcgacagttcattgtaaagcagggtctgttaacgcaagtgcaaatggaacagttgtatgactggaagtctgaagacctcgatatctggctcatacgagtcaacgcaatcgaacggaaattaatggaccgtgagttcgcgcggatactgattcacatggtgaagaatagaggattcaaatcaaatcgcaaatctgagttgaaggaaggagataatggtgtagttttgtctgctgttcaagagaataagcagctcatggaagagaagggctaccagactatcgccgagatgcttttgttcgacgagcgttttgaaggtcgaaagcggaacaaaggtggtgcatattcgcacgttgtttcgcgtagcgagttggagtctgagataagactgatcttccaaaagcagcgcgagtatggccatcattttgcacgcgtagagaatgaagaagttttcataaacatctgggcaagtcaacgcccgtttgcgactaaggatgatatagcaaagaagatcggtacatgtacatttgaagagaatgaaaagcgcgtaccgaagtccacctacaccttcgagcgttttcgcgcgttcgataaacttaatcgattgcggatagtctccacggtcgcgccgacacgggccctgacagaagaagagaagtccttgatccttgacagccttttctctaagaaggaagttaagtacaaggagcttcgtaagctgttaaaactgcaagacgagcaaagatttaacgagctctattatgaccccaacgagactaacgacaagaatgagaaccggacattcctgtccctcgaatcacaatacaagatacggaaggtaatacaacaggttgagggcaagaatataaatgactcctaccgaccagtcgaccttgacacgattgcctacgcgctgacaacctttaaagacgatcacgacatacgggactatctccaaaaccgttatgtttcttctcatggaaagaaaactgaaaacctggctaaccgcgtctataaagaggaactgattgaggagttactgcaattaagtttctctaagtacggtcacctgtctctgaaagctttaaagaacattttgccgcacatggagaagggcatcccataccataaggcctgcgagcaggcaggctaccagttttccaagaaagctgacaaagacaaggagtacttctcgccggtaatacaagccaaagacatcgctaatcctgtcgtcgtgagatcgctgtctcaagtacgcaaggtgataaacggtattatcaagaagtatggtagcccatctgccatctatattgaattggcacgagagatgggacgggtttacaaggagcggaaggagattgagaaacagtacaacaagaatcgcgacatcaatgagggagcgaagcaacatattctggagctgcatccggaattcggacatcccagaggtcacgacattttgaagtacaaactgtggaaggagcaggatggccggtgtgcgtactcattcgaaccgatatccatggagagactcttccatattgggtacgctgaggtagaccacgtcattccgtactctcgcggtttcgacgactcaaacagcaataaggttttggtgctggctgccgagaatcaaaataaacagaatcgtacaccacacgaatggttcggtcacgacgagactcggtggcaacaatttgtatcttttgtgacaacgatgaaggtgtcaaagaagaagaagggcctgctgctgaagagaaacttggatgaggagcaagcagaggagttccgctcaagacacctcaacgatactcgctacatcacacgatatatcaagtcattcattgaagacaatttacagttccggctggaagagggtaagaagcaatatgtccacactgtcaacggagcctacacaagcctgatgagaaaacgttggggttttaacaagaatcgtcaagagaatgacctgcatcacgccttggatgcggtgatcattgccgtgagtcttccgttcaagcatagagttagcgcttattttaagcgtcgtgaggaatacgcccataaccagttgaaacgcgaacgagagttctttccagagccatggcctggcttcgtgcacgaactcgaaattcgtatgatgcaaaacgccgagaagatgaagttaggtcttgagtcattggatcttaaaacctacgatgaaagcttccttagagaggtgcaacccattttcgtcagtcggatgcctaagcggtcaatcaagggtcaaatacacgaggcaacccttaaacgtgtgcggggtaacacggaagatgggtacattcgtactgtcaagaaggtgcgccttgatcagatccccttcgataagaatggagacttcccaatgttcggtaaggaaactgacatgaagacttatgaggcaattaagaatcgctacctggaatacaagaaggataagaagaaggcctttctggagccgttatacaagcctgcaaagaatcctgagaacgccccgatcatccggtcagtgaagatcgaagataaggcgaatcgtgtcgtaatgctggacgataaaacggcggctgataatgcttccattgtcaaaactgaagtcttccggcaccgagagacgggcaaattcttccttactccgatctatgtatctgatgttttatccaatcgaattcccgaaaagtttattaccccagggaaaccttactcacaatggaaggacatcacggacgagtatgagtacttgtttgcgctctaccctaacgaccttatccgcgtgaaaatgccgaaggagaaagaaacgaagacgaatataggcgagaagcacgtatggcaagagaactttatgtacttcaaaggggtgcattccgcggatgcaggaatcaagctgatcgaccacatgaacagcttcgaggataaaattggcacgcaacggttggtggccttcgagaaatatcaagtcgaccctcttggggagcttacgaaggtccacggggagaaacgtcatgggatc

SEQ ID NO: 165 - DNA, 3231 bp, synthetic construct
  source 1..3231: mol_type = other DNA
  misc_feature 1..3231: note = human codon optimized LPG10205
atgaaatatagtattgggcttgacatagggatcgcgtcagttggctgggctgttatcaatgaggagattgaccgcatcgaaaatttgggcgttcggatctttgacgccgctgaaaatcccaaagatggcagctctctcgcaaccccacgccgagaggcccgtagcactcgtaagagactccgtcgccgtagacaccgtatcgaacgtgctcgtcagttcattgtgcaacagggacttctgacacaagtacaaatggagcagttatacgactggaaatctgaggatttagacatctggttgatccgggtcaacgcgatcgagcgtaagttgatggaccgggaattcgcccggatcctgatccacatggtgaagaaccgtgggttcaaatccaaccgcaagtctgagctcaaagagggtgacaacggagtggttttaagcgcggtacaagaaaataagcagctcatggaagagaaggagtaccaaacgatcgccgaaatgttgctcttcgacgagaagtttgaaggtcggaagcgcaacaagggtggcgcgtattcccatgtggttagccggagcgagcttgagtcagaaatacggctgatattccaaaagcagcgagagtacggccaccatttcgcacgggaagaaaacgaggaagcgtttataaacatctgggcatcccaacgacccttcgcaactaaagatgacatcgcaaagaagatcggaacatgcactttcgaggagaatgaaaagcgggtacctaagtccacatacaccttcgagcgtttccgggccttcgacaaattaaaccggttgagaattgtaagcacagtagctccgacccgcgcccttacggaagaagagaagagtctgattctcgattctttgttttcgaagaaggaagtcaagtacaaggagttgcgaaagcttcttaaattacaagatgagcagcgttttaacgagctgtattacgacccgaatgaaactaacgacaagaatgagaacagaactttcttgtccctggaaagtcaatataagatccgcaaagttatccaacaggtagagggcaagaatataaatgacagctacagaccagttgacttagacactattgcctacgcattgactacctttaaagacgatcatgacattcgtgactatctccagaatcggtacgtcagttctcatggaaagaagacagagaacctggctaacagagtttacaaagaggaattaatcgaagagcttcttcagttgtcgttctctaagtacgggcacctgagtttgaaagctttgaagaatatacttccacatatggaaaagggaattccatatcacaaggcctgtgaagaggccggatatcagttcagcaagaaggcagacaaagacaaggagtattttctccccgttatccaagcaaaggatatcgcgaatcctgtcgtggtgagatcattatcacaagtccgcaaggtcatcaacggaattattaagaagtacggatccccgtcggctatatacattgagcttgcgcgggagatgggaagagtctacaaggagagaaaggagatagagaaacaatacaacaagaacagagacataaatgagggagcaaaacaacatatattagagttgcacccagagtttggtcacccgcgtggtcacgacatactcaagtataaactctggaaggagcaagacggtcgatgcgcctacagtttcgaaccaattagcatggaacgtctgttccacattggttacgcagaagtagaccacgtcatcccatatagtcggggttttgatgactccaacagtaacaaagtattagtcttagctgcggagaaccaaaataaacaaaacagaacacctcatgaatggttcggccatgacgaaaccagatggcaacagttcgtgtccttcgttacaaccatgaaggtaagtaagaagaagaagggactgttattgaagcgcaaccttgacgaagaacaagccgaggaattcagaagccgtcacctgaatgacacgagatacataacacgctacatcaaaagctttattgaagacaatctgcaattccgactcgaggaaggcaagaagcagtatgtccacactgttaatggtgcgtacacatcgctgatgagaaagcgatggggcttcaacaagaatcgacaggagaacgatcttcaccacgcactcgacgccgtcatcatcgctgtctcgttacccttcaaacatcgcgtgtcggcatatttcaagagacgcgaggaatacgctcataaccagttgaagcgtgagcgtgagttcttcccagagccttggccaggattcgtccacgagctggagattcgcatgatgcaaaacgccgagaagatgaagcttggcctggaatcgctggacttgaagacatacgatgaatcattcttacgcgaggtacaacctattttcgtttcccgaatgccaaagcgcagtatcaagggccagatccacgaggccactctgaagcgggtccgcggcaataccgaagatggttacattcgcaccgtgaagaaggttcgcctggatcagatacctttcgataagaatggtgactttcccatgtttgggaaggagaccgatatgaagacgtatgaggctataaagaatcgctacctcgaatacaagaaggataagaagaaggcttttcttgaacctttgtataaaccggcgaagaatccggaaaatgcccctataatacgttctgttaagatcgaagataaggccaatcgcgtagtaatgttagacgacaaaaccgcagctgacaacgcatccatagtgaaaaccgaggtattccgtcatcgtgagaccggaaaattcttcctgactcccatctacgtgtccgacgttctgagtaatcgtattccggaaaagttcatcacgccgggcaagccgtactcgcaatggaaagatataacagacgaatacgagtaccttttcgctctgtacccgaacgatcttattcgggtgaagatgccgaaagagaaggagacaaagacaaacattggagaaaagcacgtgtggcaggagaacttcatgtactttaaaggggttcactcggcagatgcgggaattaagttgatagaccacatgaactcattcgaggacaagataggaacccaacgacttgtcgcgtttgaaaagtaccaggtggacccgttaggggaattaaccaaagtacatggcgagaagcgccacgggatc

SEQ ID NO: 166 - DNA, 3213 bp, synthetic construct
  source 1..3213: mol_type = other DNA
  misc_feature 1..3213: note = human codon optimized LPG10207
atgaagaagctggattatcgtattggcttagatattggtacaaatagtataggttggggtattattgaactgtcatggaatcgcgacaaggaacaatatgaaaaggttcgcattgtagataagggaattcgtatgttcgataaagcagagataccgaagactggcgcttccctggcagaacccagaagaatcgcaagatcgagtcgacggcgtttgaaccgaaagtcacagcggaagaaggacattcgcaatttgttaattcaacatgaagtgattaaccagaaagagctggattccttgtacccgctgtctaagaagtcaattgatatatgggatattagattggacggtcttgaccgattgctcaaccgactggaatgggctcgcttattaatccacttagcacaacgtcgcgggttcaagagcaaccgcaaaagcgagctgaaagatgaagagacgggaaaagttctgtcttcaattcaagccaatgagaaacggttgtccctgtaccgcactgttggggaaatgtggatgaaggacgctgacttcagtaagtacgacaagagacggaactccccgaatgagtacgtcttctctgtgaaccgtgtggacttagaaaaggagattgtgacattgtttgaagcccagcgcaacttccagtcttcctacgcgtctgtcgacttacaagagacttacttgcaaatttgggcacaccagctgccattcgcttctgggaacgccattcttaataaagtaggatactgtagtttgttaaagggcaaggagaagagaatcccaaaggcaacctacacgtttcaatactttagcgccttagatcagataaatcgtacacgactgggtcctgaattccaacgtgtaacgaccgaacagcgcaacctgatccttgacaaggtgtttcaacgtacggactattacaagaagaagacgatccccgaagtgacatactacgacatacggaagtggctcgcgctggatgagaccatacaattcaagggtctgatctacgatcctaatgaggagttgaagaagatcgagaagaagccattcattaacctgaaacctttctatgagatcaagaaaatcgtagcgaactacacagagaaaactaatgaggccttttcgacacttgactacgacactgtcgcttacgctcttacagtttataagacggacaaggatattcgttcatacctcaaaagtccgcacaatctctccaaacgctgttacgatgatcaactgatcgaggagctgttaagcctctcttacacaaagtttggacacctgtcattaaaggctatcaactatgtattacccattatgcaagagggacggacgtacaaggaagctgcagaccaattaggttttgacaccacccacctgaagaaggaaaagcgctctaagttcttgccgcctatctctgacgagattaccaatcctatagtcaagcgcgccctgacacaggctcgtaaggtcgttaacgcgatcattcgtcgctatggctcaccacacagtgtgcatatagagctggcgagagagttaagtaagagtagagaggagcggaacaagataaaagcagcacaagacgaaaattacaagaagaataagggagcaatctctatattaagtgagcatggcattttagaccccacgggttacgatattgtgcgttataagctgtggaaagaacaaggcgaacgttgcgcctacagccttaagactattccacctgacactttcttcaacgagcttagaaaggagcgcaacggtagtccaatattagaggtcgaccacattttgccctacagccaatcattcatagactcatatgacaataaggttttggtgtactccgacgagaaccgtaagaagggtaaccagatcccctacttttactttctggaaacgaataaggactgggatagtttcgagaaatatgtaagaagtaacaaactcttttcgaagaagaagtcgggctatctgctcaagaaagcatatttaccacgcgagagcgaactgattaaagaacggcaccttaatgacacacgttacgctagtagttttctgaagaatttcattgaacagaacttacaattcaaggaaatcgagggcaacccacgtaagaagcacgttcaaactgttaatggtataataacggctcacctgcgtaagcgatggggcctggagaaggatcgacaagagacatatctgcaccatgctatggatgcgattatcgtggcatgcacggatcaccatatggtcaccaaagtaacagagtactatcaaaccaaggagtcgaacaagagcgtgaagaagccctatttccccctgccttgggaaggcttccgagatgaattacttagccatttggcctcgcaacctatcgccaagaagattagtgaagaactgaaggccgggttccaaccgtctaactatattttggtttctcgaatgcctaagcgatcgattaccggtgccgcccacgaccaaacaatcatgaagaagggtggaattgataagaagggtaagacaatcataataaagagattgcagcttaaggacatcaaattcgatgagaatggagacttcaaaatggtgggaaaagagcaggacatagcaacctacgaggcaattcgtcaacgttacttaaaacacggcaagaactcaaagaaggccttcgagactcccctttataaaccgtccaagaagggtaaggggaacctgataaccaaagttaaggtggaagtgcaaacaaagtcttttgttcgtgaggtcaatggtggagttgcccaaaacggggacctgattcgcatagacttgtttgagaaggactacaagtactatatggtaccgatttacgtattagacacagtatgctccgagttaccgaataaggttgtcacaagctccaagggttacgaacaatggctcacactcgataatagcttcatgttcaagttctcactgtacccgtatgatttagttcgcttaatcaaaggagatgaggatagatttctctactttagcacccttgacatcgactctgaccggttaatcttcaaggatgttaacaagccttctaagaagaatgaatatcgatacagcctgaagacgatcgaggatttagagaagtacgacgttggtgttctcggggacttgtcccttgtgcgacaagaagttcgtcgtaagttccaa

SEQ ID NO: 167 - DNA, 3231 bp, synthetic construct
  source 1..3231: mol_type = other DNA
  misc_feature 1..3231: note = human codon optimized LPG10208
atgaagtactccataggtttagacatcggtattgcgtctgtgggatgggccgtcattaatgaggaagtcaatcgcatagaaaatttaggggtccgcatattcgacgttgcagaaaaccctaaggacggtagcagcttagccacaccgcggagagaagcgcgcagtgctcgcaagcggcttcgccgccgtcgtcacagaatagagagaactcggcaattcattgtcaaacagggcttattaacccaagtgcaaatggaacagctgtatgattggaagtctgaagacctcgacatctggttaattcgggttaatgcaattgaaagaaagctgatggacagagagtttgcccgtatccttatacatatggttaagaatcggggtttcaagtcgaatcgcaaatcggaactgaaagaaggtgacaatggtgttgtcttgtctgccgtacaagaaaacaagcaactgatggaagagaaagggtaccagacaatcgcagagatgttacttttcgatgagcgttttgaaggccgtaagcggaacaaaggtggcgcttactcacatgtggtttctcgtagcgaattagaatctgaaatccgcttgatcttccagaaacaacgcgaatacgggcaccattttgcccgcgttgagaacgaagaggtgttcattaacatatgggcatcccagcgcccgtttgcgacgaaagacgacattgctaagaagatagggacttgtactttcgaggagaatgagaagcgagtgccaaagagtacctataccttcgaacgctttagagcttttgacaagcttaatcgtctgcgtatcgtaagtactgttgctccgacccgtgctctcaccgaagaggaaaagtctctgatcctggatagcctgttttctaagaaagaggtgaaatacaaggaacttcgaaagctgttaaagctgcaagacgaacaacgtttcaatgagctgtactacgacccaaacgagactaatgataagaacgaaaaccgcaccttcttgagcctggaatctcagtataaaatacggaaagtgatacaacaagtcgagggaaagaatataaatgacagttatcgtcctgtcgacctggacactattgcgtacgcactcactactttcaaggacgaccacgacatccgtgactacctgcaaaatcgctacgtttcttctcatggaaagaagacagagaacctggcgaaccgagtgtataaggaagaattaatagaggaactgctccagttgtcgttttcaaagtatggccacctctccttgaaagctcttaagaacattctgccacacatggagaaggggatcccgtatcacaaggcgtgcgaagaggcagggtaccaattttcaaagaaggcggacaaagacaaggagtactttcttcctgtaatccaagcaaaggacattgccaatcctgtggtcgttcgctcgttgtcacaagtccgaaaggttattaacggcattatcaagaagtacggcagtcctagtgctatatacatcgagctggccagagagatggggcgcgtgtacaaggagcggaaggagattgaaaagcaatacaacaagaaccgtgacatcaatgaaggcgcgaagcagcacatcctcgagcttcatcctgagttcggacaccctcgcggtcacgacatacttaagtataaactctggaaggaacaagacggtcgttgtgcatactcgttcgaaccgatctctatggaaagactcttccacataggttatgccgaggttgaccacgtcataccttacagtcgtggattcgacgactctaacagtaacaaggtgctggtgctggcagcagagaaccaaaataagcagaaccgtacacctcacgaatggttcggccacgacgagacacgatggcagcagtttgttagttttgtcaccacaatgaaagtatccaagaagaagaagggtcttttactgaagcgcaaccttgatgaagaacaagcagaggaattcagatctcgccacctgaacgacacgcggtatattacaagatatatcaaaagttttatagaagacaacctgcaatttcgcttggaagagggaaagaaacaatacgtgcacactgttaatggcgcatacaccagcctgatgcgcaagcgctggggctttaacaagaatcgtcaagagaatgacttacaccacgccctggatgctgtgataattgcggtttccctgccctttaagcatcgtgtgagcgcctatttcaagcgtcgtgaggaatacgcacacaatcaacttaagcgagagcgggagttcttcccggagccatggcctggcttcgtccacgagcttgagatccgaatgatgcaaaatgcagagaagatgaagttgggtctcgagtctcttgacctgaagacctacgatgaatccttcttgcgggaagtacaacccatctttgtgtcgagaatgcccaaaagatcgattaaggggcagatacacgaggcgacattaaaacgcgtgcgcgggaacacggaagatggatacatcagaacagtgaagaaagtcagattggaccagattccattcgacaagaatggtgacttccccatgttcggcaaagagacagatatgaaaacttacgaagctataaagaaccggtatcttgaatacaagaaagacaagaagaaggctttccttgagccactctataaaccggcgaagaatccggaaaacgccccgattatacggagcgtaaagatcgaagataaagctaatcgcgttgtgatgctcgacgataaaacagctgctgacaacgcgtcaatagttaagactgaggttttccggcacagagagacaggtaagttcttcttaacgcccatctacgtatccgatgtgctttcaaaccggatcccagaaaagttcattacaccaggaaagccttattctcaatggaaggatatcactgacgaatatgagtatctcttcgcgctgtacccaaatgacctgatacgtgttaagatgccgaaggagaaggagaccaagacaaacatcggagagaagcacgtttggcaggagaatttcatgtactttaagggcgttcacagtgcggacgctgggattaagcttatagatcatatgaactcctttgaggacaagattggcacacagcgtttagtcgcgtttgagaaatatcaagttgaccctcttggagagctgacgaaggtccatggtgaaaagcggcatgggatc

SEQ ID NO: 168 - protein, 9 aa, synthetic construct
  REGION 1..9: note = SV40 NLS
MAPKKKRKV

SEQ ID NO: 169 - protein, 22 aa, synthetic construct
  REGION 1..22: note = 3xFLAG tags
DYKDHDGDYKDHDIDYKDDDDK

SEQ ID NO: 170 - protein, 16 aa, synthetic construct
  REGION 1..16: note = nucleoplasmin NLS
KRPAATKKAGQAKKKK

SEQ ID NO: 171 - DNA, 203 bp, synthetic construct
  source 1..203: mol_type = other DNA
  misc_feature 1..203: note = CMV promoter
tgatgcggttttggcagtacatcaatgggcgtggatagcggtttgactcacggggatttccaagtctccaccccattgacgtcaatgggagtttgttttggcaccaaaatcaacgggactttccaaaatgtcgtaacaactccgccccattgacgcaaatgggcggtaggcgtgtacggtgggaggtctatataagcagagct

SEQ ID NO: 172 - DNA, 380 bp, synthetic construct
  source 1..380: mol_type = other DNA
  misc_feature 1..380: note = CMV transcription enhancer
aactgctgatcgagtgtagccagatctagtaatcaattacggggtcattagttcatagcccatatatggagttccgcgttacataacttacggtaaatggcccgcctggctgaccgcccaacgacccccgcccattgacgtcaataatgacgtatgttcccatagtaacgccaatagggactttccattgacgtcaatgggtggagtatttacggtaaactgcccacttggcagtacatcaagtgtatcatatgccaagtacgccccctattgacgtcaatgacggtaaatggcccgcctggcattatgcccagtacatgaccttatgggactttcctacttggcagtacatctacgtattagtcatcgctattaccatg

SEQ ID NO: 173 - DNA, 318 bp, synthetic construct
  source 1..318: mol_type = other DNA
  misc_feature 1..318: note = RNA polIII U6 promoter
tgtacaaaaaagcaggctttaaaggaaccaattcagtcgactggatccggtaccaaggtcgggcaggaagagggcctatttcccatgattccttcatatttgcatatacgatacaaggctgttagagagataattagaattaatttgactgtaaacacaaagatattagtacaaaatacgtgacgtagaaagtaataatttcttgggtagtttgcagttttaaaattatgttttaaaatggactatcatatgcttaccgtaacttgaaagtatttcgatttcttggctttatatatcttgtggaaaggacgaaacacc

SEQ ID NO: 174 - RNA, 160 nt, synthetic construct
  source 1..160: mol_type = other RNA
  misc_feature 1..160: note = SGN003657
ttctggatatctgtgggacaagagggtcatagttccattaaagccattaaagagatttatagagttattatggtaaggcattatgccgtggcgttggggatcgcctaactccgatttttatcggatttccctaaaaatgactaactttgtttagtcattt

SEQ ID NO: 175 - RNA, 160 nt, synthetic construct
  source 1..160: mol_type = other RNA
  misc_feature 1..160: note = SGN003656
acggcagggtcagggttctggatatgtcatagttccattaaagccattaaagagatttatagagttattatggtaaggcattatgccgtggcgttggggatcgcctaactccgatttttatcggatttccctaaaaatgactaactttgtttagtcattt

SEQ ID NO: 176 - RNA, 160 nt, synthetic construct
  source 1..160: mol_type = other RNA
  misc_feature 1..160: note = SGN003655
agtctctcagctggtacacggcagggtcatagttccattaaagccattaaagagatttatagagttattatggtaaggcattatgccgtggcgttggggatcgcctaactccgatttttatcggatttccctaaaaatgactaactttgtttagtcattt

SEQ ID NO: 177 - RNA, 160 nt, synthetic construct
  source 1..160: mol_type = other RNA
  misc_feature 1..160: note = SGN003654
atttagagtctctcagctggtacacgtcatagttccattaaagccattaaagagatttatagagttattatggtaaggcattatgccgtggcgttggggatcgcctaactccgatttttatcggatttccctaaaaatgactaactttgtttagtcattt

SEQ ID NO: 178 - RNA, 160 nt, synthetic construct
  source 1..160: mol_type = other RNA
  misc_feature 1..160: note = SGN003653
taaggccacggagcgagacatctcggtcatagttccattaaagccattaaagagatttatagagttattatggtaaggcattatgccgtggcgttggggatcgcctaactccgatttttatcggatttccctaaaaatgactaactttgtttagtcattt

SEQ ID NO: 179 - RNA, 160 nt, synthetic construct
  source 1..160: mol_type = other RNA
  misc_feature 1..160: note = SGN003652
tagcgcgagcacagctaaggccacggtcatagttccattaaagccattaaagagatttatagagttattatggtaaggcattatgccgtggcgttggggatcgcctaactccgatttttatcggatttccctaaaaatgactaactttgtttagtcattt

SEQ ID NO: 180 - RNA, 160 nt, synthetic construct
  source 1..160: mol_type = other RNA
  misc_feature 1..160: note = SGN003651
agagtagcgcgagcacagctaaggcgtcatagttccattaaagccattaaagagatttatagagttattatggtaaggcattatgccgtggcgttggggatcgcctaactccgatttttatcggatttccctaaaaatgactaactttgtttagtcattt

SEQ ID NO: 181 - RNA, 160 nt, synthetic construct
  source 1..160: mol_type = other RNA
  misc_feature 1..160: note = SGN003650
ctcacgctggatagcctccaggccagtcatagttccattaaagccattaaagagatttatagagttattatggtaaggcattatgccgtggcgttggggatcgcctaactccgatttttatcggatttccctaaaaatgactaactttgtttagtcattt

SEQ ID NO: 182 - RNA, 130 nt, synthetic construct
  source 1..130: mol_type = other RNA
  misc_feature 1..130: note = SGN003665
cactggatttagagtctctcagctggttgcggttggccctcaatcaaaggagggcctcccgttaacaagcttatgcacaaaatggggcaccctgcggggtgccccttccatttgtgagcgcgactggttt

SEQ ID NO: 183 - RNA, 130 nt, synthetic construct
  source 1..130: mol_type = other RNA
  misc_feature 1..130: note = SGN003664
gtaccagctgagagactctaaatccgttgcggttggccctcaatcaaaggagggcctcccgttaacaagcttatgcacaaaatggggcaccctgcggggtgccccttccatttgtgagcgcgactggttt

SEQ ID NO: 184 - RNA, 130 nt, synthetic construct
  source 1..130: mol_type = other RNA
  misc_feature 1..130: note = SGN003663
ccctgaccctgccgtgtaccagctggttgcggttggccctcaatcaaaggagggcctcccgttaacaagcttatgcacaaaatggggcaccctgcggggtgccccttccatttgtgagcgcgactggttt

SEQ ID NO: 185 - RNA, 130 nt, synthetic construct
  source 1..130: mol_type = other RNA
  misc_feature 1..130: note = SGN003662
ctcttgtcccacagatatccagaacgttgcggttggccctcaatcaaaggagggcctcccgttaacaagcttatgcacaaaatggggcaccctgcggggtgccccttccatttgtgagcgcgactggttt

SEQ ID NO: 186 - RNA, 130 nt, synthetic construct
  source 1..130: mol_type = other RNA
  misc_feature 1..130: note = SGN003661
ctgatcctcttgtcccacagatatcgttgcggttggccctcaatcaaaggagggcctcccgttaacaagcttatgcacaaaatggggcaccctgcggggtgccccttccatttgtgagcgcgactggttt

SEQ ID NO: 187 - RNA, 130 nt, synthetic construct
  source 1..130: mol_type = other RNA
  misc_feature 1..130: note = SGN003660
cgcgagcacagctaaggccacggaggttgcggttggccctcaatcaaaggagggcctcccgttaacaagcttatgcacaaaatggggcaccctgcggggtgccccttccatttgtgagcgcgactggttt

SEQ ID NO: 188 - RNA, 130 nt, synthetic construct
  source 1..130: mol_type = other RNA
  misc_feature 1..130: note = SGN003659
gagagagtagcgcgagcacagctaagttgcggttggccctcaatcaaaggagggcctcccgttaacaagcttatgcacaaaatggggcaccctgcggggtgccccttccatttgtgagcgcgactggttt

SEQ ID NO: 189 - RNA, 130 nt, synthetic construct
  source 1..130: mol_type = other RNA
  misc_feature 1..130: note = SGN003658
ccaggccagaaagagagagtagcgcgttgcggttggccctcaatcaaaggagggcctcccgttaacaagcttatgcacaaaatggggcaccctgcggggtgccccttccatttgtgagcgcgactggttt

SEQ ID NO: 190 - RNA, 136 nt, synthetic construct
  source 1..136: mol_type = other RNA
  misc_feature 1..136: note = SGN003673
tgatcctcttgtcccacagatatccgtcatagttccattaaagccattaaagaatggctttgatgtttctatgataagggtttcggcccgtggcgttggggatcgcctgcccatttcaatgggcttctccccattt

SEQ ID NO: 191 - RNA, 136 nt, synthetic construct
  source 1..136: mol_type = other RNA
  misc_feature 1..136: note = SGN003672
tcttgtcccacagatatccagaaccgtcatagttccattaaagccattaaagaatggctttgatgtttctatgataagggtttcggcccgtggcgttggggatcgcctgcccatttcaatgggcttctccccattt

SEQ ID NO: 192 - RNA, 136 nt, synthetic construct
  source 1..136: mol_type = other RNA
  misc_feature 1..136: note = SGN003671
cctgatcctcttgtcccacagatatgtcatagttccattaaagccattaaagaatggctttgatgtttctatgataagggtttcggcccgtggcgttggggatcgcctgcccatttcaatgggcttctccccattt

SEQ ID NO: 193 - RNA, 136 nt, synthetic construct
  source 1..136: mol_type = other RNA
  misc_feature 1..136: note = SGN003670
tgccgtgtaccagctgagagactctgtcatagttccattaaagccattaaagaatggctttgatgtttctatgataagggtttcggcccgtggcgttggggatcgcctgcccatttcaatgggcttctccccattt

SEQ ID NO: 194 - RNA, 136 nt, synthetic construct
  source 1..136: mol_type = other RNA
  misc_feature 1..136: note = SGN003669
tgacagcattcgggccgagatgtctgtcatagttccattaaagccattaaagaatggctttgatgtttctatgataagggtttcggcccgtggcgttggggatcgcctgcccatttcaatgggcttctccccattt

SEQ ID NO: 195 - RNA, 136 nt, synthetic construct
  source 1..136: mol_type = other RNA
  misc_feature 1..136: note = SGN003668
ggagagactcacgctggatagcctcgtcatagttccattaaagccattaaagaatggctttgatgtttctatgataagggtttcggcccgtggcgttggggatcgcctgcccatttcaatgggcttctccccattt

SEQ ID NO: 196 - RNA, 136 nt, synthetic construct
  source 1..136: mol_type = other RNA
  misc_feature 1..136: note = SGN003667
aagagagagtagcgcgagcacagctgtcatagttccattaaagccattaaagaatggctttgatgtttctatgataagggtttcggcccgtggcgttggggatcgcctgcccatttcaatgggcttctccccattt

SEQ ID NO: 197 - RNA, 136 nt, synthetic construct
  source 1..136: mol_type = other RNA
  misc_feature 1..136: note = SGN003666
cattcgggccgagatgtctcgctccgtcatagttccattaaagccattaaagaatggctttgatgtttctatgataagggtttcggcccgtggcgttggggatcgcctgcccatttcaatgggcttctccccattt

SEQ ID NO: 198 - RNA, 163 nt, synthetic construct
  source 1..163: mol_type = other RNA
  misc_feature 1..163: note = SGN003687
acggcagggtcagggttctggatatgctatagttccataagaaacaaaggtttcttacgttactatagtaagggcaatgacccgtggcgtttggggatcgcctcatccattacggatattctccccatgtgaaaagcacctaagcataaggctaaggtgcttt

SEQ ID NO: 199 - RNA, 163 nt, synthetic construct
  source 1..163: mol_type = other RNA
  misc_feature 1..163: note = SGN003686
agctggtacacggcagggtcagggtgctatagttccataagaaacaaaggtttcttacgttactatagtaagggcaatgacccgtggcgtttggggatcgcctcatccattacggatattctccccatgtgaaaagcacctaagcataaggctaaggtgcttt

SEQ ID NO: 200 - RNA, 163 nt, synthetic construct
  source 1..163: mol_type = other RNA
  misc_feature 1..163: note = SGN003685
ttagagtctctcagctggtacacgggctatagttccataagaaacaaaggtttcttacgttactatagtaagggcaatgacccgtggcgtttggggatcgcctcatccattacggatattctccccatgtgaaaagcacctaagcataaggctaaggtgcttt

SEQ ID NO: 201 - RNA, 163 nt, synthetic construct
  source 1..163: mol_type = other RNA
  misc_feature 1..163: note = SGN003684
cagaaccctgaccctgccgtgtaccgctatagttccataagaaacaaaggtttcttacgttactatagtaagggcaatgacccgtggcgtttggggatcgcctcatccattacggatattctccccatgtgaaaagcacctaagcataaggctaaggtgcttt

SEQ ID NO: 202 - RNA, 163 nt, synthetic construct
  source 1..163: mol_type = other RNA
  misc_feature 1..163: note = SGN003683
gcgcgagcacagctaaggccacggagctatagttccataagaaacaaaggtttcttacgttactatagtaagggcaatgacccgtggcgtttggggatcgcctcatccattacggatattctccccatgtgaaaagcacctaagcataaggctaaggtgcttt

SEQ ID NO: 203 - RNA, 163 nt, synthetic construct
  source 1..163: mol_type = other RNA
  misc_feature 1..163: note = SGN003682
agtagcgcgagcacagctaaggccagctatagttccataagaaacaaaggtttcttacgttactatagtaagggcaatgacccgtggcgtttggggatcgcctcatccattacggatattctccccatgtgaaaagcacctaagcataaggctaaggtgcttt

SEQ ID NO: 204 - RNA, 163 nt, synthetic construct
  source 1..163: mol_type = other RNA
  misc_feature 1..163: note = SGN003681
aaagagagagtagcgcgagcacagcgctatagttccataagaaacaaaggtttcttacgttactatagtaagggcaatgacccgtggcgtttggggatcgcctcatccattacggatattctccccatgtgaaaagcacctaagcataaggctaaggtgcttt

SEQ ID NO: 205 - RNA, 163 nt, synthetic construct
  source 1..163: mol_type = other RNA
  misc_feature 1..163: note = SGN003680
ggccagaaagagagagtagcgcgaggctatagttccataagaaacaaaggtttcttacgttactatagtaagggcaatgacccgtggcgtttggggatcgcctcatccattacggatattctccccatgtgaaaagcacctaagcataaggctaaggtgcttt

SEQ ID NO: 206 - RNA, 120 nt, synthetic construct
  source 1..120: mol_type = other RNA
  misc_feature 1..120: note = SGN003695
cctgaccctgccgtgtaccagctgagttatagtgtcatgttgaatagaaagctattcaacatggcaagttataataagctttatgcgtattcaaacttttgttaaggcgacatcgccttt

SEQ ID NO: 207 - RNA, 120 nt, synthetic construct
  source 1..120: mol_type = other RNA
  misc_feature 1..120: note = SGN003694
ccagaaccctgaccctgccgtgtacgttatagtgtcatgttgaatagaaagctattcaacatggcaagttataataagctttatgcgtattcaaacttttgttaaggcgacatcgccttt

SEQ ID NO: 208 - RNA, 120 nt, synthetic construct
  source 1..120: mol_type = other RNA
  misc_feature 1..120: note = SGN003693
acagatatccagaaccctgaccctggttatagtgtcatgttgaatagaaagctattcaacatggcaagttataataagctttatgcgtattcaaacttttgttaaggcgacatcgccttt

SEQ ID NO: 209 - RNA, 120 nt, synthetic construct
  source 1..120: mol_type = other RNA
  misc_feature 1..120: note = SGN003692
ctgatcctcttgtcccacagatatcgttatagtgtcatgttgaatagaaagctattcaacatggcaagttataataagctttatgcgtattcaaacttttgttaaggcgacatcgccttt

SEQ ID NO: 210 - RNA, 120 nt, synthetic construct
  source 1..120: mol_type = other RNA
  misc_feature 1..120: note = SGN003691
tagcgcgagcacagctaaggccacggttatagtgtcatgttgaatagaaagctattcaacatggcaagttataataagctttatgcgtattcaaacttttgttaaggcgacatcgccttt

SEQ ID NO: 211 - RNA, 120 nt, synthetic construct
  source 1..120: mol_type = other RNA
  misc_feature 1..120: note = SGN003690
gccgagatgtctcgctccgtggcctgttatagtgtcatgttgaatagaaagctattcaacatggcaagttataataagctttatgcgtattcaaacttttgttaaggcgacatcgccttt

SEQ ID NO: 212 - RNA, 120 nt, synthetic construct
  source 1..120: mol_type = other RNA
  misc_feature 1..120: note = SGN003689
attcgggccgagatgtctcgctccggttatagtgtcatgttgaatagaaagctattcaacatggcaagttataataagctttatgcgtattcaaacttttgttaaggcgacatcgccttt

SEQ ID NO: 213 - RNA, 120 nt, synthetic construct
  source 1..120: mol_type = other RNA
  misc_feature 1..120: note = SGN003688
ctgacagcattcgggccgagatgtcgttatagtgtcatgttgaatagaaagctattcaacatggcaagttataataagctttatgcgtattcaaacttttgttaaggcgacatcgccttt

SEQ ID NO: 214 - RNA, 99 nt, synthetic construct
  source 1..99: mol_type = other RNA
  misc_feature 1..99: note = SGN004196
ttgtcccacagatatccagaaccctgccataattcctcaaaggagttattatggtaaggcattatgccgtggcgttggggatcgcctaactccgatttt

SEQ ID NO: 215 - RNA, 99 nt, synthetic construct
  source 1..99: mol_type = other RNA
  misc_feature 1..99: note = SGN004195
atcctcttgtcccacagatatccaggccataattcctcaaaggagttattatggtaaggcattatgccgtggcgttggggatcgcctaactccgatttt

SEQ ID NO: 216 - RNA, 99 nt, synthetic construct
  source 1..99: mol_type = other RNA
  misc_feature 1..99: note = SGN004194
ggccgagatgtctcgctccgtggccgccataattcctcaaaggagttattatggtaaggcattatgccgtggcgttggggatcgcctaactccgatttt

SEQ ID NO: 217 - RNA, 99 nt, synthetic construct
  source 1..99: mol_type = other RNA
  misc_feature 1..99: note = SGN004193
cttagctgtgctcgcgctactctctgccataattcctcaaaggagttattatggtaaggcattatgccgtggcgttggggatcgcctaactccgatttt

SEQ ID NO: 218 - RNA, 99 nt, synthetic construct
  source 1..99: mol_type = other RNA
  misc_feature 1..99: note = SGN004192
tcccacagatatccagaaccctgacgccataattcctcaaaggagttattatggtaaggcattatgccgtggcgttggggatcgcctaactccgatttt

SEQ ID NO: 219 - RNA, 99 nt, synthetic construct
  source 1..99: mol_type = other RNA
  misc_feature 1..99: note = SGN004191
tcttgtcccacagatatccagaaccgccataattcctcaaaggagttattatggtaaggcattatgccgtggcgttggggatcgcctaactccgatttt

SEQ ID NO: 220 - RNA, 99 nt, synthetic construct
  source 1..99: mol_type = other RNA
  misc_feature 1..99: note = SGN004190
tgatcctcttgtcccacagatatccgccataattcctcaaaggagttattatggtaaggcattatgccgtggcgttggggatcgcctaactccgatttt

SEQ ID NO: 221 - RNA, 99 nt, synthetic construct
  source 1..99: mol_type = other RNA
  misc_feature 1..99: note = SGN004189
gatatccagaaccctgaccctgccggccataattcctcaaaggagttattatggtaaggcattatgccgtggcgttggggatcgcctaactccgatttt

SEQ ID NO: 222 - RNA, 99 nt, synthetic construct
  source 1..99: mol_type = other RNA
  misc_feature 1..99: note = SGN004188
ggagagactcacgctggatagcctcgccataattcctcaaaggagttattatggtaaggcattatgccgtggcgttggggatcgcctaactccgatttt

SEQ ID NO: 223 - RNA, 99 nt, synthetic construct
  source 1..99: mol_type = other RNA
  misc_feature 1..99: note = SGN004187
gggtaggagagactcacgctggatagccataattcctcaaaggagttattatggtaaggcattatgccgtggcgttggggatcgcctaactccgatttt

SEQ ID NO: 224 - RNA, 99 nt, synthetic construct
  source 1..99: mol_type = other RNA
  misc_feature 1..99: note = SGN004186
aagagagagtagcgcgagcacagctgccataattcctcaaaggagttattatggtaaggcattatgccgtggcgttggggatcgcctaactccgatttt

SEQ ID NO: 225 - RNA, 99 nt, synthetic construct
  source 1..99: mol_type = other RNA
  misc_feature 1..99: note = SGN004185
tgacagcattcgggccgagatgtctgccataattcctcaaaggagttattatggtaaggcattatgccgtggcgttggggatcgcctaactccgatttt

SEQ ID NO: 226 - RNA, 110 nt, synthetic construct
  source 1..110: mol_type = other RNA
  misc_feature 1..110: note = SGN004205
gggctggggaagaaggtgtcttctggtttcggcactctctcagaaagctgagagaacctgccgaaacaagagttcatctcgaaatcagtcccacttcgtgtggggctttt

SEQ ID NO: 227 - RNA, 110 nt, synthetic construct
  source 1..110: mol_type = other RNA
  misc_feature 1..110: note = SGN004204
ctgactttgcatgtgcaaacgccttgtttcggcactctctcagaaagctgagagaacctgccgaaacaagagttcatctcgaaatcagtcccacttcgtgtggggctttt

SEQ ID NO: 228 - RNA, 110 nt, synthetic construct
  source 1..110: mol_type = other RNA
  misc_feature 1..110: note = SGN004203
aaggattctgatgtgtatatcacaggtttcggcactctctcagaaagctgagagaacctgccgaaacaagagttcatctcgaaatcagtcccacttcgtgtggggctttt

SEQ ID NO: 229 - RNA, 110 nt, synthetic construct
  source 1..110: mol_type = other RNA
  misc_feature 1..110: note = SGN004202
actttgtgacacatttgtttgagaagtttcggcactctctcagaaagctgagagaacctgccgaaacaagagttcatctcgaaatcagtcccacttcgtgtggggctttt

SEQ ID NO: 230 - RNA, 110 nt, synthetic construct
  source 1..110: mol_type = other RNA
  misc_feature 1..110: note = SGN004201
cctcccggctccagatgttcttcgcgtttcggcactctctcagaaagctgagagaacctgccgaaacaagagttcatctcgaaatcagtcccacttcgtgtggggctttt

SEQ ID NO: 231 - RNA, 110 nt, synthetic construct
  source 1..110: mol_type = other RNA
  misc_feature 1..110: note = SGN004200
tttgcagtgcgttccaccaggccacgtttcggcactctctcagaaagctgagagaacctgccgaaacaagagttcatctcgaaatcagtcccacttcgtgtggggctttt

SEQ ID NO: 232 - RNA, 110 nt, synthetic construct
  source 1..110: mol_type = other RNA
  misc_feature 1..110: note = SGN004199
tgtacgtggcctggtggaacgcactgtttcggcactctctcagaaagctgagagaacctgccgaaacaagagttcatctcgaaatcagtcccacttcgtgtggggctttt

SEQ ID NO: 233 - RNA, 110 nt, synthetic construct
  source 1..110: mol_type = other RNA
  misc_feature 1..110: note = SGN004198
cggctccggcccgtcatccaccaaggtttcggcactctctcagaaagctgagagaacctgccgaaacaagagttcatctcgaaatcagtcccacttcgtgtggggctttt

SEQ ID NO: 234 - RNA, 110 nt, synthetic construct
  source 1..110: mol_type = other RNA
  misc_feature 1..110: note = SGN004197
tcattgcaggaatgaatgctgtggagtttcggcactctctcagaaagctgagagaacctgccgaaacaagagttcatctcgaaatcagtcccacttcgtgtggggctttt

SEQ ID NO: 235 - RNA, 119 nt, synthetic construct
  source 1..119: mol_type = other RNA
  misc_feature 1..119: note = SGN005313
atgaaacccagacacatagcaattcgttgcggctggacaaaggtccttccgttaacacgctcgggaacgcaagttccttgcagcacaagatgtgcggcgggcctcggcccgccgcgttt

SEQ ID NO: 236 - RNA, 119 nt, synthetic construct
  source 1..119: mol_type = other RNA
  misc_feature 1..119: note = SGN005312
caggcatactcatctttttcagtgggttgcggctggacaaaggtccttccgttaacacgctcgggaacgcaagttccttgcagcacaagatgtgcggcgggcctcggcccgccgcgttt

SEQ ID NO: 237 - RNA, 119 nt, synthetic construct
  source 1..119: mol_type = other RNA
  misc_feature 1..119: note = SGN005311
gacaaagtcacatggttcacacggcgttgcggctggacaaaggtccttccgttaacacgctcgggaacgcaagttccttgcagcacaagatgtgcggcgggcctcggcccgccgcgttt

SEQ ID NO: 238 - RNA, 119 nt, synthetic construct
  source 1..119: mol_type = other RNA
  misc_feature 1..119: note = SGN005310
ctgtgacaaagtcacatggttcacagttgcggctggacaaaggtccttccgttaacacgctcgggaacgcaagttccttgcagcacaagatgtgcggcgggcctcggcccgccgcgttt

SEQ ID NO: 239 - RNA, 119 nt, synthetic construct
  source 1..119: mol_type = other RNA
  misc_feature 1..119: note = SGN005309
agtagcgcgagcacagctaaggccagttgcggctggacaaaggtccttccgttaacacgctcgggaacgcaagttccttgcagcacaagatgtgcggcgggcctcggcccgccgcgttt

SEQ ID NO: 240 - RNA, 119 nt, synthetic construct
  source 1..119: mol_type = other RNA
  misc_feature 1..119: note = SGN005308
gatttagagtctctcagctggtacagttgcggctggacaaaggtccttccgttaacacgctcgggaacgcaagttccttgcagcacaagatgtgcggcgggcctcggcccgccgcgttt

SEQ ID NO: 241 - RNA, 119 nt, synthetic construct
  source 1..119: mol_type = other RNA
  misc_feature 1..119: note = SGN005307
tgtttgagaatcaaaatcggtgaatgttgcggctggacaaaggtccttccgttaacacgctcgggaacgcaagttccttgcagcacaagatgtgcggcgggcctcggcccgccgcgttt

SEQ ID NO: 242 - RNA, 119 nt, synthetic construct
  source 1..119: mol_type = other RNA
  misc_feature 1..119: note = SGN005306
gacacatttgtttgagaatcaaaatgttgcggctggacaaaggtccttccgttaacacgctcgggaacgcaagttccttgcagcacaagatgtgcggcgggcctcggcccgccgcgttt

SEQ ID NO: 243 - RNA, 119 nt, synthetic construct
  source 1..119: mol_type = other RNA
  misc_feature 1..119: note = SGN005305
tcttctggaataatgctgttgttgagttgcggctggacaaaggtccttccgttaacacgctcgggaacgcaagttccttgcagcacaagatgtgcggcgggcctcggcccgccgcgttt

SEQ ID NO: 244 - RNA, 119 nt, synthetic construct
  source 1..119: mol_type = other RNA
  misc_feature 1..119: note = SGN005304
ctgcccttacctgggctggggaagagttgcggctggacaaaggtccttccgttaacacgctcgggaacgcaagttccttgcagcacaagatgtgcggcgggcctcggcccgccgcgttt

SEQ ID NO: 245 - RNA, 124 nt, synthetic construct
  source 1..124: mol_type = other RNA
  misc_feature 1..124: note = SGN005323
gcgagcacagctaaggccacggagcgtttcagctggatgtcaaaggacatccagaagttgaaatcaagcaagacttaaagtcaagcttctacctttgatccacgctttgtggacagtacatatt

SEQ ID NO: 246 - RNA, 124 nt, synthetic construct
  source 1..124: mol_type = other RNA
  misc_feature 1..124: note = SGN005322
agtagcgcgagcacagctaaggccagtttcagctggatgtcaaaggacatccagaagttgaaatcaagcaagacttaaagtcaagcttctacctttgatccacgctttgtggacagtacatatt

SEQ ID NO: 247 - RNA, 124 nt, synthetic construct
  source 1..124: mol_type = other RNA
  misc_feature 1..124: note = SGN005321
gaaagagagagtagcgcgagcacaggtttcagctggatgtcaaaggacatccagaagttgaaatcaagcaagacttaaagtcaagcttctacctttgatccacgctttgtggacagtacatatt

SEQ ID NO: 248 - RNA, 124 nt, synthetic construct
  source 1..124: mol_type = other RNA
  misc_feature 1..124: note = SGN005320
cacgctggatagcctccaggccagagtttcagctggatgtcaaaggacatccagaagttgaaatcaagcaagacttaaagtcaagcttctacctttgatccacgctttgtggacagtacatatt

SEQ ID NO: 249 - RNA, 124 nt, synthetic construct
  source 1..124: mol_type = other RNA
  misc_feature 1..124: note = SGN005319
ctttctggcctggaggctatccagcgtttcagctggatgtcaaaggacatccagaagttgaaatcaagcaagacttaaagtcaagcttctacctttgatccacgctttgtggacagtacatatt

SEQ ID NO: 250 - RNA, 124 nt, synthetic construct
  source 1..124: mol_type = other RNA
  misc_feature 1..124: note = SGN005318
ctgccgtgtaccagctgagagactcgtttcagctggatgtcaaaggacatccagaagttgaaatcaagcaagacttaaagtcaagcttctacctttgatccacgctttgtggacagtacatatt

SEQ ID NO: 251 - RNA, 124 nt, synthetic construct
  source 1..124: mol_type = other RNA
  misc_feature 1..124: note = SGN005317
gaaccctgaccctgccgtgtaccaggtttcagctggatgtcaaaggacatccagaagttgaaatcaagcaagacttaaagtcaagcttctacctttgatccacgctttgtggacagtacatatt

SEQ ID NO: 252 - RNA, 124 nt, synthetic construct
  source 1..124: mol_type = other RNA
  misc_feature 1..124: note = SGN005316
tcttgtcccacagatatccagaaccgtttcagctggatgtcaaaggacatccagaagttgaaatcaagcaagacttaaagtcaagcttctacctttgatccacgctttgtggacagtacatatt

SEQ ID NO: 253 - RNA, 124 nt, synthetic construct
  source 1..124: mol_type = other RNA
  misc_feature 1..124: note = SGN005315
tgatcctcttgtcccacagatatccgtttcagctggatgtcaaaggacatccagaagttgaaatcaagcaagacttaaagtcaagcttctacctttgatccacgctttgtggacagtacatatt

SEQ ID NO: 254 - RNA, 124 nt, synthetic construct
  source 1..124: mol_type = other RNA
  misc_feature 1..124: note = SGN005314
ctgatcctcttgtcccacagatatcgtttcagctggatgtcaaaggacatccagaagttgaaatcaagcaagacttaaagtcaagcttctacctttgatccacgctttgtggacagtacatatt

SEQ ID NO: 255 - RNA, 144 nt, synthetic construct
  source 1..144: mol_type = other RNA
  misc_feature 1..144: note = SGN005333
ggtttcatccatccgacattgaagtgttggaaatctatccaaagggatagattcccaataaggcgcagcgggatttagctgcactggttgctcacgacatcaacatgtcgtaggggaggctccttcacggggcctccccgtttt

SEQ ID NO: 256 - RNA, 144 nt, synthetic construct
  source 1..144: mol_type = other RNA
  misc_feature 1..144: note = SGN005332
gtcatccagcagagaatggaaagtcgttggaaatctatccaaagggatagattcccaataaggcgcagcgggatttagctgcactggttgctcacgacatcaacatgtcgtaggggaggctccttcacggggcctccccgtttt

SEQ ID NO: 257 - RNA, 144 nt, synthetic construct
  source 1..144: mol_type = other RNA
  misc_feature 1..144: note = SGN005331
gccttagctgtgctcgcgctactctgttggaaatctatccaaagggatagattcccaataaggcgcagcgggatttagctgcactggttgctcacgacatcaacatgtcgtaggggaggctccttcacggggcctccccgtttt

SEQ ID NO: 258 - RNA, 144 nt, synthetic construct
  source 1..144: mol_type = other RNA
  misc_feature 1..144: note = SGN005330
ggccttagctgtgctcgcgctactcgttggaaatctatccaaagggatagattcccaataaggcgcagcgggatttagctgcactggttgctcacgacatcaacatgtcgtaggggaggctccttcacggggcctccccgtttt

SEQ ID NO: 259 - RNA, 144 nt, synthetic construct
  source 1..144: mol_type = other RNA
  misc_feature 1..144: note = SGN005329
ttcgggccgagatgtctcgctccgtgttggaaatctatccaaagggatagattcccaataaggcgcagcgggatttagctgcactggttgctcacgacatcaacatgtcgtaggggaggctccttcacggggcctccccgtttt

SEQ ID NO: 260 - RNA, 144 nt, synthetic construct
  source 1..144: mol_type = other RNA
  misc_feature 1..144: note = SGN005328
tgaataggcagacagacttgtcactgttggaaatctatccaaagggatagattcccaataaggcgcagcgggatttagctgcactggttgctcacgacatcaacatgtcgtaggggaggctccttcacggggcctccccgtttt

SEQ ID NO: 261 - RNA, 144 nt, synthetic construct
  source 1..144: mol_type = other RNA
  misc_feature 1..144: note = SGN005327
tcagaatccttactttgtgacacatgttggaaatctatccaaagggatagattcccaataaggcgcagcgggatttagctgcactggttgctcacgacatcaacatgtcgtaggggaggctccttcacggggcctccccgtttt

SEQ ID NO: 262 - RNA, 144 nt, synthetic construct
  source 1..144: mol_type = other RNA
  misc_feature 1..144: note = SGN005326
agtccatagacctcatgtctagcacgttggaaatctatccaaagggatagattcccaataaggcgcagcgggatttagctgcactggttgctcacgacatcaacatgtcgtaggggaggctccttcacggggcctccccgtttt

SEQ ID NO: 263 - RNA, 144 nt, synthetic construct
  source 1..144: mol_type = other RNA
  misc_feature 1..144: note = SGN005325
tcaacaacagcattattccagaagagttggaaatctatccaaagggatagattcccaataaggcgcagcgggatttagctgcactggttgctcacgacatcaacatgtcgtaggggaggctccttcacggggcctccccgtttt

SEQ ID NO: 264 - RNA, 144 nt, synthetic construct
  source 1..144: mol_type = other RNA
  misc_feature 1..144: note = SGN005324
gtgacaagtctgtctgcctattcacgttggaaatctatccaaagggatagattcccaataaggcgcagcgggatttagctgcactggttgctcacgacatcaacatgtcgtaggggaggctccttcacggggcctccccgtttt

SEQ ID NO: 265 - RNA, 120 nt, synthetic construct
  source 1..120: mol_type = other RNA
  misc_feature 1..120: note = SGN005343
ttccattctctgctggatgacgtgagttatagatgtacttcaaaggaagtacagagttataatcaaacaagtgcttcggcacaagtttctacttatgagtcagttatctgaccattacat

SEQ ID NO: 266 - RNA, 120 nt, synthetic construct
  source 1..120: mol_type = other RNA
  misc_feature 1..120: note = SGN005342
taagtcaacttcaatgtcggatggagttatagatgtacttcaaaggaagtacagagttataatcaaacaagtgcttcggcacaagtttctacttatgagtcagttatctgaccattacat

SEQ ID NO: 267 - RNA, 120 nt, synthetic construct
  source 1..120: mol_type = other RNA
  misc_feature 1..120: note = SGN005341
ttactcacgtcatccagcagagaatgttatagatgtacttcaaaggaagtacagagttataatcaaacaagtgcttcggcacaagtttctacttatgagtcagttatctgaccattacat

SEQ ID NO: 268 - RNA, 120 nt, synthetic construct
  source 1..120: mol_type = other RNA
  misc_feature 1..120: note = SGN005340
cttttcccgatattcctcaggtactgttatagatgtacttcaaaggaagtacagagttataatcaaacaagtgcttcggcacaagtttctacttatgagtcagttatctgaccattacat

SEQ ID NO: 269 - RNA, 120 nt, synthetic construct
  source 1..120: mol_type = other RNA
  misc_feature 1..120: note = SGN005339
actcacgctggatagcctccaggccgttatagatgtacttcaaaggaagtacagagttataatcaaacaagtgcttcggcacaagtttctacttatgagtcagttatctgaccattacat

SEQ ID NO: 270 - RNA, 120 nt, synthetic construct
  source 1..120: mol_type = other RNA
  misc_feature 1..120: note = SGN005338
actttgtgacacatttgtttgagaagttatagatgtacttcaaaggaagtacagagttataatcaaacaagtgcttcggcacaagtttctacttatgagtcagttatctgaccattacat

SEQ ID NO: 271 - RNA, 120 nt, synthetic construct
  source 1..120: mol_type = other RNA
  misc_feature 1..120: note = SGN005337
gctgttgttgaaggcgtttgcacatgttatagatgtacttcaaaggaagtacagagttataatcaaacaagtgcttcggcacaagtttctacttatgagtcagttatctgaccattacat

SEQ ID NO: 272 - RNA, 120 nt, synthetic construct
  source 1..120: mol_type = other RNA
  misc_feature 1..120: note = SGN005336
attttgattctcaaacaaatgtgtcgttatagatgtacttcaaaggaagtacagagttataatcaaacaagtgcttcggcacaagtttctacttatgagtcagttatctgaccattacat

SEQ ID NO: 273 - RNA, 120 nt, synthetic construct
  source 1..120: mol_type = other RNA
  misc_feature 1..120: note = SGN005335
tctgcctattcaccgattttgattcgttatagatgtacttcaaaggaagtacagagttataatcaaacaagtgcttcggcacaagtttctacttatgagtcagttatctgaccattacat

SEQ ID NO: 274 - RNA, 120 nt, synthetic construct
  source 1..120: mol_type = other RNA
  misc_feature 1..120: note = SGN005334
cctgccgtgtaccagctgagagactgttatagatgtacttcaaaggaagtacagagttataatcaaacaagtgcttcggcacaagtttctacttatgagtcagttatctgaccattacat

SEQ ID NO: 275 - RNA, 104 nt, synthetic construct
  source 1..104: mol_type = other RNA
  misc_feature 1..104: note = SGN005353
ttaccccacttaactatcttgggctgctatagttccttaccaaagggtaagttgctgtagtaagggcaacagacccgaggcgttggggatcgcctagcccgttt

SEQ ID NO: 276 - RNA, 104 nt, synthetic construct
  source 1..104: mol_type = other RNA
  misc_feature 1..104: note = SGN005352
ccgtgtgaaccatgtgactttgtcagctatagttccttaccaaagggtaagttgctgtagtaagggcaacagacccgaggcgttggggatcgcctagcccgttt

SEQ ID NO: 277 - RNA, 104 nt, synthetic construct
  source 1..104: mol_type = other RNA
  misc_feature 1..104: note = SGN005351
ctcacgtcatccagcagagaatggagctatagttccttaccaaagggtaagttgctgtagtaagggcaacagacccgaggcgttggggatcgcctagcccgttt

SEQ ID NO: 278 - RNA, 104 nt, synthetic construct
  source 1..104: mol_type = other RNA
  misc_feature 1..104: note = SGN005350
tgtcttttcccgatattcctcaggtgctatagttccttaccaaagggtaagttgctgtagtaagggcaacagacccgaggcgttggggatcgcctagcccgttt

SEQ ID NO: 279 - RNA, 104 nt, synthetic construct
  source 1..104: mol_type = other RNA
  misc_feature 1..104: note = SGN005349
gtgtcttttcccgatattcctcagggctatagttccttaccaaagggtaagttgctgtagtaagggcaacagacccgaggcgttggggatcgcctagcccgttt

SEQ ID NO: 280 - RNA, 104 nt, synthetic construct
  source 1..104: mol_type = other RNA
  misc_feature 1..104: note = SGN005348
cttactttgtgacacatttgtttgagctatagttccttaccaaagggtaagttgctgtagtaagggcaacagacccgaggcgttggggatcgcctagcccgttt

SEQ ID NO: 281 - RNA, 104 nt, synthetic construct
  source 1..104: mol_type = other RNA
  misc_feature 1..104: note = SGN005347
aatgctgttgttgaaggcgtttgcagctatagttccttaccaaagggtaagttgctgtagtaagggcaacagacccgaggcgttggggatcgcctagcccgttt

SEQ ID NO: 282 - RNA, 104 nt, synthetic construct
  source 1..104: mol_type = other RNA
  misc_feature 1..104: note = SGN005346
ccgattttgattctcaaacaaatgtgctatagttccttaccaaagggtaagttgctgtagtaagggcaacagacccgaggcgttggggatcgcctagcccgttt

SEQ ID NO: 283 - RNA, 104 nt, synthetic construct
  source 1..104: mol_type = other RNA
  misc_feature 1..104: note = SGN005345
ctgcctattcaccgattttgattctgctatagttccttaccaaagggtaagttgctgtagtaagggcaacagacccgaggcgttggggatcgcctagcccgttt

SEQ ID NO: 284 - RNA, 104 nt, synthetic construct
  source 1..104: mol_type = other RNA
  misc_feature 1..104: note = SGN005344
ctgtctgcctattcaccgattttgagctatagttccttaccaaagggtaagttgctgtagtaagggcaacagacccgaggcgttggggatcgcctagcccgttt

SEQ ID NO: 285 - RNA, 110 nt, synthetic construct
  source 1..110: mol_type = other RNA
  misc_feature 1..110: note = SGN005363
agagagagtagcgcgagcacagctagttgcggctggaccacgaaagcgtggtctggccgttaacaagccaagacggcaccagataaggcgctcgctccggcgggcgcttt

SEQ ID NO: 286 - RNA, 110 nt, synthetic construct
  source 1..110: mol_type = other RNA
  misc_feature 1..110: note = SGN005362
tccaggccagaaagagagagtagcggttgcggctggaccacgaaagcgtggtctggccgttaacaagccaagacggcaccagataaggcgctcgctccggcgggcgcttt

SEQ ID NO: 287 - RNA, 110 nt, synthetic construct
  source 1..110: mol_type = other RNA
  misc_feature 1..110: note = SGN005361
actcacgctggatagcctccaggccgttgcggctggaccacgaaagcgtggtctggccgttaacaagccaagacggcaccagataaggcgctcgctccggcgggcgcttt

SEQ ID NO: 288 - RNA, 110 nt, synthetic construct
  source 1..110: mol_type = other RNA
  misc_feature 1..110: note = SGN005360
gagagactcacgctggatagcctccgttgcggctggaccacgaaagcgtggtctggccgttaacaagccaagacggcaccagataaggcgctcgctccggcgggcgcttt

SEQ ID NO: 289 - RNA, 110 nt, synthetic construct
  source 1..110: mol_type = other RNA
  misc_feature 1..110: note = SGN005359
attcgggccgagatgtctcgctccggttgcggctggaccacgaaagcgtggtctggccgttaacaagccaagacggcaccagataaggcgctcgctccggcgggcgcttt

SEQ ID NO: 290 - RNA, 110 nt, synthetic construct
  source 1..110: mol_type = other RNA
  misc_feature 1..110: note = SGN005358
gtgctgtggcctggagcaacaaatcgttgcggctggaccacgaaagcgtggtctggccgttaacaagccaagacggcaccagataaggcgctcgctccggcgggcgcttt

SEQ ID NO: 291 - RNA, 110 nt, synthetic construct
  source 1..110: mol_type = other RNA
  misc_feature 1..110: note = SGN005357
caaatgtgtcacaaagtaaggattcgttgcggctggaccacgaaagcgtggtctggccgttaacaagccaagacggcaccagataaggcgctcgctccggcgggcgcttt

SEQ ID NO: 292 - RNA, 110 nt, synthetic construct
  source 1..110: mol_type = other RNA
  misc_feature 1..110: note = SGN005356
ctgaccctgccgtgtaccagctgaggttgcggctggaccacgaaagcgtggtctggccgttaacaagccaagacggcaccagataaggcgctcgctccggcgggcgcttt

SEQ ID NO: 293 - RNA, 110 nt, synthetic construct
  source 1..110: mol_type = other RNA
  misc_feature 1..110: note = SGN005355
cttgtcccacagatatccagaacccgttgcggctggaccacgaaagcgtggtctggccgttaacaagccaagacggcaccagataaggcgctcgctccggcgggcgcttt

SEQ ID NO: 294 - RNA, 110 nt, synthetic construct
  source 1..110: mol_type = other RNA
  misc_feature 1..110: note = SGN005354
tgatcctcttgtcccacagatatccgttgcggctggaccacgaaagcgtggtctggccgttaacaagccaagacggcaccagataaggcgctcgctccggcgggcgcttt

SEQ ID NO: 295 - RNA, 148 nt, synthetic construct
  source 1..148: mol_type = other RNA
  misc_feature 1..148: note = SGN005372
acggcaggcatactcatctttttcagccataattcctccaaagggagttattatggtaaggcattatgccgcggcgttgggaatcgcctatattcgattaatatcgaatcttcccacaaaatgactaacttagtttagtcattttttt

SEQ ID NO: 296 - RNA, 148 nt, synthetic construct
  source 1..148: mol_type = other RNA
  misc_feature 1..148: note = SGN005371
acacggcaggcatactcatctttttgccataattcctccaaagggagttattatggtaaggcattatgccgcggcgttgggaatcgcctatattcgattaatatcgaatcttcccacaaaatgactaacttagtttagtcattttttt

SEQ ID NO: 297 - RNA, 148 nt, synthetic construct
  source 1..148: mol_type = other RNA
  misc_feature 1..148: note = SGN005370
atgtaagacttaccccacttaactagccataattcctccaaagggagttattatggtaaggcattatgccgcggcgttgggaatcgcctatattcgattaatatcgaatcttcccacaaaatgactaacttagtttagtcattttttt

SEQ ID NO: 298 - RNA, 148 nt, synthetic construct
  source 1..148: mol_type = other RNA
  misc_feature 1..148: note = SGN005369
gactttgtcacagcccaagatagttgccataattcctccaaagggagttattatggtaaggcattatgccgcggcgttgggaatcgcctatattcgattaatatcgaatcttcccacaaaatgactaacttagtttagtcattttttt

SEQ ID NO: 299 - RNA, 148 nt, synthetic construct
  source 1..148: mol_type = other RNA
  misc_feature 1..148: note = SGN005368
agtcaaatttcctgaattgctatgtgccataattcctccaaagggagttattatggtaaggcattatgccgcggcgttgggaatcgcctatattcgattaatatcgaatcttcccacaaaatgactaacttagtttagtcattttttt

SEQ ID NO: 300 - RNA, 148 nt, synthetic construct
  source 1..148: mol_type = other RNA
  misc_feature 1..148: note = SGN005367
acggcagggtcagggttctggatatgccataattcctccaaagggagttattatggtaaggcattatgccgcggcgttgggaatcgcctatattcgattaatatcgaatcttcccacaaaatgactaacttagtttagtcattttttt

SEQ ID NO: 301 - RNA, 148 nt, synthetic construct
  source 1..148: mol_type = other RNA
  misc_feature 1..148: note = SGN005366
agtctctcagctggtacacggcagggccataattcctccaaagggagttattatggtaaggcattatgccgcggcgttgggaatcgcctatattcgattaatatcgaatcttcccacaaaatgactaacttagtttagtcattttttt

SEQ ID NO: 302 - RNA, 148 nt, synthetic construct
  source 1..148: mol_type = other RNA
  misc_feature 1..148: note = SGN005365
atttagagtctctcagctggtacacgccataattcctccaaagggagttattatggtaaggcattatgccgcggcgttgggaatcgcctatattcgattaatatcgaatcttcccacaaaatgactaacttagtttagtcattttttt

SEQ ID NO: 303 - RNA, 148 nt, synthetic construct
  source 1..148: mol_type = other RNA
  misc_feature 1..148: note = SGN005364
gaagacaccttcttccccagcccaggccataattcctccaaagggagttattatggtaaggcattatgccgcggcgttgggaatcgcctatattcgattaatatcgaatcttcccacaaaatgactaacttagtttagtcattttttt

SEQ ID NO: 304 - RNA, 147 nt, synthetic construct
  source 1..147: mol_type = other RNA
  misc_feature 1..147: note = SGN005382
ctctctttctggcctggaggctatcgccataattcctccaaagggagttattatggtaaggcattatgccgtggcgttggggatcgcctacatccgattagatcggattctccctaaaaatgactaactttgtttagtcattttttt

SEQ ID NO: 305 - RNA, 147 nt, synthetic construct
  source 1..147: mol_type = other RNA
  misc_feature 1..147: note = SGN005381
ccgagatgtctcgctccgtggccttgccataattcctccaaagggagttattatggtaaggcattatgccgtggcgttggggatcgcctacatccgattagatcggattctccctaaaaatgactaactttgtttagtcattttttt

SEQ ID NO: 306 - RNA, 147 nt, synthetic construct
  source 1..147: mol_type = other RNA
  misc_feature 1..147: note = SGN005380
acagcattcgggccgagatgtctcggccataattcctccaaagggagttattatggtaaggcattatgccgtggcgttggggatcgcctacatccgattagatcggattctccctaaaaatgactaactttgtttagtcattttttt

SEQ ID NO: 307 - RNA, 147 nt, synthetic construct
  source 1..147: mol_type = other RNA
  misc_feature 1..147: note = SGN005379
acacggcagggtcagggttctggatgccataattcctccaaagggagttattatggtaaggcattatgccgtggcgttggggatcgcctacatccgattagatcggattctccctaaaaatgactaactttgtttagtcattttttt

SEQ ID NO: 308 - RNA, 147 nt, synthetic construct
  source 1..147: mol_type = other RNA
  misc_feature 1..147: note = SGN005378
gtgacacatttgtttgagaatcaaagccataattcctccaaagggagttattatggtaaggcattatgccgtggcgttggggatcgcctacatccgattagatcggattctccctaaaaatgactaactttgtttagtcattttttt

SEQ ID NO: 309 - RNA, 147 nt, synthetic construct
  source 1..147: mol_type = other RNA
  misc_feature 1..147: note = SGN005377
agctgcccttacctgggctggggaagccataattcctccaaagggagttattatggtaaggcattatgccgtggcgttggggatcgcctacatccgattagatcggattctccctaaaaatgactaactttgtttagtcattttttt

SEQ ID NO: 310 - RNA, 147 nt, synthetic construct
  source 1..147: mol_type = other RNA
  misc_feature 1..147: note = SGN005376
cgtgtaccagctgagagactctaaagccataattcctccaaagggagttattatggtaaggcattatgccgtggcgttggggatcgcctacatccgattagatcggattctccctaaaaatgactaactttgtttagtcattttttt

SEQ ID NO: 311 - RNA, 147 nt, synthetic construct
  source 1..147: mol_type = other RNA
  misc_feature 1..147: note = SGN005375
ccacagatatccagaaccctgacccgccataattcctccaaagggagttattatggtaaggcattatgccgtggcgttggggatcgcctacatccgattagatcggattctccctaaaaatgactaactttgtttagtcattttttt

SEQ ID NO: 312 - RNA, 147 nt, synthetic construct
  source 1..147: mol_type = other RNA
  misc_feature 1..147: note = SGN005374
agtagcgcgagcacagctaaggccagccataattcctccaaagggagttattatggtaaggcattatgccgtggcgttggggatcgcctacatccgattagatcggattctccctaaaaatgactaactttgtttagtcattttttt

SEQ ID NO: 313 - RNA, 147 nt, synthetic construct
  source 1..147: mol_type = other RNA
  misc_feature 1..147: note = SGN005373
tagcctccaggccagaaagagagaggccataattcctccaaagggagttattatggtaaggcattatgccgtggcgttggggatcgcctacatccgattagatcggattctccctaaaaatgactaactttgtttagtcattttttt

SEQ ID NO: 314 - RNA, 147 nt, synthetic construct
  source 1..147: mol_type = other RNA
  misc_feature 1..147: note = SGN005392
ctctctttctggcctggaggctatcgccataattcctccaaagggagttattatggtaaggcattatgccgtggcgttggggatcgcctacatccgattatatcggattctccctaaaaatgactaactttgtttagtcattttttt

SEQ ID NO: 315 - RNA, 147 nt, synthetic construct
  source 1..147: mol_type = other RNA
  misc_feature 1..147: note = SGN005391
ccgagatgtctcgctccgtggccttgccataattcctccaaagggagttattatggtaaggcattatgccgtggcgttggggatcgcctacatccgattatatcggattctccctaaaaatgactaactttgtttagtcattttttt

SEQ ID NO: 316 - RNA, 147 nt, synthetic construct
  source 1..147: mol_type = other RNA
  misc_feature 1..147: note = SGN005390
acagcattcgggccgagatgtctcggccataattcctccaaagggagttattatggtaaggcattatgccgtggcgttggggatcgcctacatccgattatatcggattctccctaaaaatgactaactttgtttagtcattttttt

SEQ ID NO: 317 - RNA, 147 nt, synthetic construct
  source 1..147: mol_type = other RNA
  misc_feature 1..147: note = SGN005389
acacggcagggtcagggttctggatgccataattcctccaaagggagttattatggtaaggcattatgccgtggcgttggggatcgcctacatccgattatatcggattctccctaaaaatgactaactttgtttagtcattttttt

SEQ ID NO: 318 - RNA, 147 nt, synthetic construct
  source 1..147: mol_type = other RNA
  misc_feature 1..147: note = SGN005388
gtgacacatttgtttgagaatcaaagccataattcctccaaagggagttattatggtaaggcattatgccgtggcgttggggatcgcctacatccgattatatcggattctccctaaaaatgactaactttgtttagtcattttttt

SEQ ID NO: 319 - RNA, 147 nt, synthetic construct
  source 1..147: mol_type = other RNA
  misc_feature 1..147: note = SGN005387
agctgcccttacctgggctggggaagccataattcctccaaagggagttattatggtaaggcattatgccgtggcgttggggatcgcctacatccgattatatcggattctccctaaaaatgactaactttgtttagtcattttttt

SEQ ID NO: 320 - RNA, 147 nt, synthetic construct
  source 1..147: mol_type = other RNA
  misc_feature 1..147: note = SGN005386
cgtgtaccagctgagagactctaaagccataattcctccaaagggagttattatggtaaggcattatgccgtggcgttggggatcgcctacatccgattatatcggattctccctaaaaatgactaactttgtttagtcattttttt

SEQ ID NO: 321 - RNA, 147 nt, synthetic construct
  source 1..147: mol_type = other RNA
  misc_feature 1..147: note = SGN005385
ccacagatatccagaaccctgacccgccataattcctccaaagggagttattatggtaaggcattatgccgtggcgttggggatcgcctacatccgattatatcggattctccctaaaaatgactaactttgtttagtcattttttt

SEQ ID NO: 322 - RNA, 147 nt, synthetic construct
  source 1..147: mol_type = other RNA
  misc_feature 1..147: note = SGN005384
agtagcgcgagcacagctaaggccagccataattcctccaaagggagttattatggtaaggcattatgccgtggcgttggggatcgcctacatccgattatatcggattctccctaaaaatgactaactttgtttagtcattttttt

SEQ ID NO: 323 - RNA, 147 nt, synthetic construct
  source 1..147: mol_type = other RNA
  misc_feature 1..147: note = SGN005383
tagcctccaggccagaaagagagaggccataattcctccaaagggagttattatggtaaggcattatgccgtggcgttggggatcgcctacatccgattatatcggattctccctaaaaatgactaactttgtttagtcattttttt

SEQ ID NO: 324 - RNA, 132 nt, synthetic construct
  source 1..132: mol_type = other RNA
  misc_feature 1..132: note = SGN005412
ctccaaagattcaggtttactcacggtcatagttccattaaagcaaaggctttgatgtttctatgataagggtttcggcccgtggcgtcggggatcgcctgcccattttgatgggcttctccccatctattt

SEQ ID NO: 325 - RNA, 132 nt, synthetic construct
  source 1..132: mol_type = other RNA
  misc_feature 1..132: note = SGN005411
tgacagcattcgggccgagatgtctgtcatagttccattaaagcaaaggctttgatgtttctatgataagggtttcggcccgtggcgtcggggatcgcctgcccattttgatgggcttctccccatctattt

SEQ ID NO: 326 - RNA, 132 nt, synthetic construct
  source 1..132: mol_type = other RNA
  misc_feature 1..132: note = SGN005410
ggagagactcacgctggatagcctcgtcatagttccattaaagcaaaggctttgatgtttctatgataagggtttcggcccgtggcgtcggggatcgcctgcccattttgatgggcttctccccatctattt

SEQ ID NO: 327 - RNA, 132 nt, synthetic construct
  source 1..132: mol_type = other RNA
  misc_feature 1..132: note = SGN005409
aagagagagtagcgcgagcacagctgtcatagttccattaaagcaaaggctttgatgtttctatgataagggtttcggcccgtggcgtcggggatcgcctgcccattttgatgggcttctccccatctattt

SEQ ID NO: 328 - RNA, 132 nt, synthetic construct
  source 1..132: mol_type = other RNA
  misc_feature 1..132: note = SGN005408
cattcgggccgagatgtctcgctccgtcatagttccattaaagcaaaggctttgatgtttctatgataagggtttcggcccgtggcgtcggggatcgcctgcccattttgatgggcttctccccatctattt

SEQ ID NO: 329 - RNA, 132 nt, synthetic construct
  source 1..132: mol_type = other RNA
  misc_feature 1..132: note = SGN005407
cttgtcccacagatatccagaacccgtcatagttccattaaagcaaaggctttgatgtttctatgataagggtttcggcccgtggcgtcggggatcgcctgcccattttgatgggcttctccccatctattt

SEQ ID NO: 330 - RNA, 132 nt, synthetic construct
  source 1..132: mol_type = other RNA
  misc_feature 1..132: note = SGN005406
tttaggttcgtatctgtaaaaccaagtcatagttccattaaagcaaaggctttgatgtttctatgataagggtttcggcccgtggcgtcggggatcgcctgcccattttgatgggcttctccccatctattt

SEQ ID NO: 331 - RNA, 132 nt, synthetic construct
  source 1..132: mol_type = other RNA
  misc_feature 1..132: note = SGN005405
tgatcctcttgtcccacagatatccgtcatagttccattaaagcaaaggctttgatgtttctatgataagggtttcggcccgtggcgtcggggatcgcctgcccattttgatgggcttctccccatctattt

SEQ ID NO: 332 - RNA, 132 nt, synthetic construct
  source 1..132: mol_type = other RNA
  misc_feature 1..132: note = SGN005404
tgccgtgtaccagctgagagactctgtcatagttccattaaagcaaaggctttgatgtttctatgataagggtttcggcccgtggcgtcggggatcgcctgcccattttgatgggcttctccccatctattt

SEQ ID NO: 333 - RNA, 132 nt, synthetic construct
  source 1..132: mol_type = other RNA
  misc_feature 1..132: note = SGN005403
tcttgtcccacagatatccagaaccgtcatagttccattaaagcaaaggctttgatgtttctatgataagggtttcggcccgtggcgtcggggatcgcctgcccattttgatgggcttctccccatctattt

SEQ ID NO: 334 - RNA, 111 nt, synthetic construct
  source 1..111: mol_type = other RNA
  misc_feature 1..111: note = SGN005393
tagcctccaggccagaaagagagaggccataattcctccaaagggagttattatggtaaggcattatgccgtggcgttggggatcgcctacatccgattatatcggattct

SEQ ID NO: 335 - RNA, 111 nt, synthetic construct
  source 1..111: mol_type = other RNA
  misc_feature 1..111: note = SGN005394
agtagcgcgagcacagctaaggccagccataattcctccaaagggagttattatggtaaggcattatgccgtggcgttggggatcgcctacatccgattatatcggattct

SEQ ID NO: 336 - RNA, 111 nt, synthetic construct
  source 1..111: mol_type = other RNA
  misc_feature 1..111: note = SGN005395
ccacagatatccagaaccctgacccgccataattcctccaaagggagttattatggtaaggcattatgccgtggcgttggggatcgcctacatccgattatatcggattct

SEQ ID NO: 337 - RNA, 111 nt, synthetic construct
  source 1..111: mol_type = other RNA
  misc_feature 1..111: note = SGN005396
cgtgtaccagctgagagactctaaagccataattcctccaaagggagttattatggtaaggcattatgccgtggcgttggggatcgcctacatccgattatatcggattct

SEQ ID NO: 338 - RNA, 111 nt, synthetic construct
  source 1..111: mol_type = other RNA
  misc_feature 1..111: note = SGN005397
agctgcccttacctgggctggggaagccataattcctccaaagggagttattatggtaaggcattatgccgtggcgttggggatcgcctacatccgattatatcggattct

SEQ ID NO: 339 - RNA, 111 nt, synthetic construct
  source 1..111: mol_type = other RNA
  misc_feature 1..111: note = SGN005398
gtgacacatttgtttgagaatcaaagccataattcctccaaagggagttattatggtaaggcattatgccgtggcgttggggatcgcctacatccgattatatcggattct

SEQ ID NO: 340 - RNA, 111 nt, synthetic construct
  source 1..111: mol_type = other RNA
  misc_feature 1..111: note = SGN005399
acacggcagggtcagggttctggatgccataattcctccaaagggagttattatggtaaggcattatgccgtggcgttggggatcgcctacatccgattatatcggattct

SEQ ID NO: 341 - RNA, 111 nt, synthetic construct
  source 1..111: mol_type = other RNA
  misc_feature 1..111: note = SGN005400
acagcattcgggccgagatgtctcggccataattcctccaaagggagttattatggtaaggcattatgccgtggcgttggggatcgcctacatccgattatatcggattct

SEQ ID NO: 342 - RNA, 111 nt, synthetic construct
  source 1..111: mol_type = other RNA
  misc_feature 1..111: note = SGN005401
ccgagatgtctcgctccgtggccttgccataattcctccaaagggagttattatggtaaggcattatgccgtggcgttggggatcgcctacatccgattatatcggattct

SEQ ID NO: 343 - RNA, 111 nt, synthetic construct
  source 1..111: mol_type = other RNA
  misc_feature 1..111: note = SGN005402
ctctctttctggcctggaggctatcgccataattcctccaaagggagttattatggtaaggcattatgccgtggcgttggggatcgcctacatccgattatatcggattct

SEQ ID NO: 344 - DNA, 25 bp, Homo sapiens
  source 1..25: mol_type = other DNA
  misc_feature 1..25: note = SGN003657 Target Sequence
ttctggatatctgtgggacaagagg

SEQ ID NO: 345 - DNA, 25 bp, Homo sapiens
  source 1..25: mol_type = other DNA
  misc_feature 1..25: note = SGN003656,  SGN003687, and SGN005367 Target Sequence
acggcagggtcagggttctggatat

SEQ ID NO: 346 - DNA, 25 bp, Homo sapiens
  source 1..25: mol_type = other DNA
  misc_feature 1..25: note = SGN003655 and SGN005366 Target Sequence
agtctctcagctggtacacggcagg

SEQ ID NO: 347 - DNA, 25 bp, Homo sapiens
  source 1..25: mol_type = other DNA
  misc_feature 1..25: note = SGN003654 and SGN005365 Target Sequence
atttagagtctctcagctggtacac

SEQ ID NO: 348 - DNA, 25 bp, Homo sapiens
  source 1..25: mol_type = other DNA
  misc_feature 1..25: note = SGN003653 Target Sequence
taaggccacggagcgagacatctcg

SEQ ID NO: 349 - DNA, 25 bp, Homo sapiens
  source 1..25: mol_type = other DNA
  misc_feature 1..25: note = SGN003652 and SGN003691 Target Sequence
tagcgcgagcacagctaaggccacg

SEQ ID NO: 350 - DNA, 25 bp, Homo sapiens
  source 1..25: mol_type = other DNA
  misc_feature 1..25: note = SGN003651 Target Sequence
agagtagcgcgagcacagctaaggc

SEQ ID NO: 351 - DNA, 25 bp, Homo sapiens
  source 1..25: mol_type = other DNA
  misc_feature 1..25: note = SGN003650 Target Sequence
ctcacgctggatagcctccaggcca

SEQ ID NO: 352 - DNA, 25 bp, Homo sapiens
  source 1..25: mol_type = other DNA
  misc_feature 1..25: note = SGN003665 Target Sequence
cactggatttagagtctctcagctg

SEQ ID NO: 353 - DNA, 25 bp, Homo sapiens
  source 1..25: mol_type = other DNA
  misc_feature 1..25: note = SGN003664 Target Sequence
gtaccagctgagagactctaaatcc

SEQ ID NO: 354 - DNA, 25 bp, Homo sapiens
  source 1..25: mol_type = other DNA
  misc_feature 1..25: note = SGN003663Target Sequence
ccctgaccctgccgtgtaccagctg

SEQ ID NO: 355 - DNA, 25 bp, Homo sapiens
  source 1..25: mol_type = other DNA
  misc_feature 1..25: note = SGN003662 Target Sequence
ctcttgtcccacagatatccagaac

SEQ ID NO: 356 - DNA, 25 bp, Homo sapiens
  source 1..25: mol_type = other DNA
  misc_feature 1..25: note = SGN003661, SGN003692, and SGN005314 Target Sequence
ctgatcctcttgtcccacagatatc

SEQ ID NO: 357 - DNA, 25 bp, Homo sapiens
  source 1..25: mol_type = other DNA
  misc_feature 1..25: note = SGN003660 Target Sequence
cgcgagcacagctaaggccacggag

SEQ ID NO: 358 - DNA, 25 bp, Homo sapiens
  source 1..25: mol_type = other DNA
  misc_feature 1..25: note = SGN003659 Target Sequence
gagagagtagcgcgagcacagctaa

SEQ ID NO: 359 - DNA, 25 bp, Homo sapiens
  source 1..25: mol_type = other DNA
  misc_feature 1..25: note = SGN003658 Target Sequence
ccaggccagaaagagagagtagcgc

SEQ ID NO: 360 - DNA, 25 bp, Homo sapiens
  source 1..25: mol_type = other DNA
  misc_feature 1..25: note = SGN003673,  SGN004190, SGN005354, SGN005405,  and SGN005315 Target Sequence
tgatcctcttgtcccacagatatcc

SEQ ID NO: 361 - DNA, 25 bp, Homo sapiens
  source 1..25: mol_type = other DNA
  misc_feature 1..25: note = SGN003672,  SGN004191, SGN005403 and SGN005316 Target Sequence
tcttgtcccacagatatccagaacc

SEQ ID NO: 362 - DNA, 25 bp, Homo sapiens
  source 1..25: mol_type = other DNA
  misc_feature 1..25: note = SGN003671 Target Sequence
cctgatcctcttgtcccacagatat

SEQ ID NO: 363 - DNA, 25 bp, Homo sapiens
  source 1..25: mol_type = other DNA
  misc_feature 1..25: note = SGN003670 and SGN005404 Target Sequence
tgccgtgtaccagctgagagactct

SEQ ID NO: 364 - DNA, 25 bp, Homo sapiens
  source 1..25: mol_type = other DNA
  misc_feature 1..25: note = SGN003669, SGN004185, and SGN005411 Target Sequence
tgacagcattcgggccgagatgtct

SEQ ID NO: 365 - DNA, 25 bp, Homo sapiens
  source 1..25: mol_type = other DNA
  misc_feature 1..25: note = SGN003668,  SGN004188, and SGN005410 Target Sequence
ggagagactcacgctggatagcctc

SEQ ID NO: 366 - DNA, 25 bp, Homo sapiens
  source 1..25: mol_type = other DNA
  misc_feature 1..25: note = SGN003667,  SGN004186, and SGN005409 Target Sequence
aagagagagtagcgcgagcacagct

SEQ ID NO: 367 - DNA, 25 bp, Homo sapiens
  source 1..25: mol_type = other DNA
  misc_feature 1..25: note = SGN003666 Target Sequence
cattcgggccgagatgtctcgctcc

SEQ ID NO: 368 - DNA, 25 bp, Homo sapiens
  source 1..25: mol_type = other DNA
  misc_feature 1..25: note = SGN003686 Target Sequence
agctggtacacggcagggtcagggt

SEQ ID NO: 369 - DNA, 25 bp, Homo sapiens
  source 1..25: mol_type = other DNA
  misc_feature 1..25: note = SGN003685 Target Sequence
ttagagtctctcagctggtacacgg

SEQ ID NO: 370 - DNA, 25 bp, Homo sapiens
  source 1..25: mol_type = other DNA
  misc_feature 1..25: note = SGN003684 Target Sequence
cagaaccctgaccctgccgtgtacc

SEQ ID NO: 371 - DNA, 25 bp, Homo sapiens
  source 1..25: mol_type = other DNA
  misc_feature 1..25: note = SGN003683 Target Sequence
gcgcgagcacagctaaggccacgga

SEQ ID NO: 372 - DNA, 25 bp, Homo sapiens
  source 1..25: mol_type = other DNA
  misc_feature 1..25: note = SGN003682,  SGN005309, SGN005374, SGN005384, SGN005394,   and SGN005322Target Sequence
agtagcgcgagcacagctaaggcca

SEQ ID NO: 373 - DNA, 25 bp, Homo sapiens
  source 1..25: mol_type = other DNA
  misc_feature 1..25: note = SGN003681 Target Sequence
aaagagagagtagcgcgagcacagc

SEQ ID NO: 374 - DNA, 25 bp, Homo sapiens
  source 1..25: mol_type = other DNA
  misc_feature 1..25: note = SGN003680 Target Sequence
ggccagaaagagagagtagcgcgag

SEQ ID NO: 375 - DNA, 25 bp, Homo sapiens
  source 1..25: mol_type = other DNA
  misc_feature 1..25: note = SGN003695Target Sequence
cctgaccctgccgtgtaccagctga

SEQ ID NO: 376 - DNA, 25 bp, Homo sapiens
  source 1..25: mol_type = other DNA
  misc_feature 1..25: note = SGN003694 Target Sequence
ccagaaccctgaccctgccgtgtac

SEQ ID NO: 377 - DNA, 25 bp, Homo sapiens
  source 1..25: mol_type = other DNA
  misc_feature 1..25: note = SGN003693 Target Sequence
acagatatccagaaccctgaccctg

SEQ ID NO: 378 - DNA, 25 bp, Homo sapiens
  source 1..25: mol_type = other DNA
  misc_feature 1..25: note = SGN003690 Target Sequence
gccgagatgtctcgctccgtggcct

SEQ ID NO: 379 - DNA, 25 bp, Homo sapiens
  source 1..25: mol_type = other DNA
  misc_feature 1..25: note = SGN003689,  SGN005359, and SGN005408 Target Sequence
attcgggccgagatgtctcgctccg

SEQ ID NO: 380 - DNA, 25 bp, Homo sapiens
  source 1..25: mol_type = other DNA
  misc_feature 1..25: note = SGN003688 Target Sequence
ctgacagcattcgggccgagatgtc

SEQ ID NO: 381 - DNA, 25 bp, Homo sapiens
  source 1..25: mol_type = other DNA
  misc_feature 1..25: note = SGN004196 Target Sequence
ttgtcccacagatatccagaaccct

SEQ ID NO: 382 - DNA, 25 bp, Homo sapiens
  source 1..25: mol_type = other DNA
  misc_feature 1..25: note = SGN004195 Target Sequence
atcctcttgtcccacagatatccag

SEQ ID NO: 383 - DNA, 25 bp, Homo sapiens
  source 1..25: mol_type = other DNA
  misc_feature 1..25: note = SGN004194 Target Sequence
ggccgagatgtctcgctccgtggcc

SEQ ID NO: 384 - DNA, 25 bp, Homo sapiens
  source 1..25: mol_type = other DNA
  misc_feature 1..25: note = SGN004193 Target Sequence
cttagctgtgctcgcgctactctct

SEQ ID NO: 385 - DNA, 25 bp, Homo sapiens
  source 1..25: mol_type = other DNA
  misc_feature 1..25: note = SGN004192 Target Sequence
tcccacagatatccagaaccctgac

SEQ ID NO: 386 - DNA, 25 bp, Homo sapiens
  source 1..25: mol_type = other DNA
  misc_feature 1..25: note = SGN004189 Target Sequence
gatatccagaaccctgaccctgccg

SEQ ID NO: 387 - DNA, 25 bp, Homo sapiens
  source 1..25: mol_type = other DNA
  misc_feature 1..25: note = SGN004187 Target Sequence
gggtaggagagactcacgctggata

SEQ ID NO: 388 - DNA, 25 bp, Homo sapiens
  source 1..25: mol_type = other DNA
  misc_feature 1..25: note = SGN004205 Target Sequence
gggctggggaagaaggtgtcttctg

SEQ ID NO: 389 - DNA, 25 bp, Homo sapiens
  source 1..25: mol_type = other DNA
  misc_feature 1..25: note = SGN004204 Target Sequence
ctgactttgcatgtgcaaacgcctt

SEQ ID NO: 390 - DNA, 25 bp, Homo sapiens
  source 1..25: mol_type = other DNA
  misc_feature 1..25: note = SGN004203 Target Sequence
aaggattctgatgtgtatatcacag

SEQ ID NO: 391 - DNA, 25 bp, Homo sapiens
  source 1..25: mol_type = other DNA
  misc_feature 1..25: note = SGN004202 and SGN005338 Target Sequence
actttgtgacacatttgtttgagaa

SEQ ID NO: 392 - DNA, 25 bp, Homo sapiens
  source 1..25: mol_type = other DNA
  misc_feature 1..25: note = SGN004201 Target Sequence
cctcccggctccagatgttcttcgc

SEQ ID NO: 393 - DNA, 25 bp, Homo sapiens
  source 1..25: mol_type = other DNA
  misc_feature 1..25: note = SGN004200 Target Sequence
tttgcagtgcgttccaccaggccac

SEQ ID NO: 394 - DNA, 25 bp, Homo sapiens
  source 1..25: mol_type = other DNA
  misc_feature 1..25: note = SGN004199 Target Sequence
tgtacgtggcctggtggaacgcact

SEQ ID NO: 395 - DNA, 25 bp, Homo sapiens
  source 1..25: mol_type = other DNA
  misc_feature 1..25: note = SGN004198 Target Sequence
cggctccggcccgtcatccaccaag

SEQ ID NO: 396 - DNA, 25 bp, Homo sapiens
  source 1..25: mol_type = other DNA
  misc_feature 1..25: note = SGN004197 Target Sequence
tcattgcaggaatgaatgctgtgga

SEQ ID NO: 397 - DNA, 25 bp, Homo sapiens
  source 1..25: mol_type = other DNA
  misc_feature 1..25: note = SGN005313 Target Sequence
atgaaacccagacacatagcaattc

SEQ ID NO: 398 - DNA, 25 bp, Homo sapiens
  source 1..25: mol_type = other DNA
  misc_feature 1..25: note = SGN005312 Target Sequence
caggcatactcatctttttcagtgg

SEQ ID NO: 399 - DNA, 25 bp, Homo sapiens
  source 1..25: mol_type = other DNA
  misc_feature 1..25: note = SGN005311Target Sequence
gacaaagtcacatggttcacacggc

SEQ ID NO: 400 - DNA, 25 bp, Homo sapiens
  source 1..25: mol_type = other DNA
  misc_feature 1..25: note = SGN005310 Target Sequence
ctgtgacaaagtcacatggttcaca

SEQ ID NO: 401 - DNA, 25 bp, Homo sapiens
  source 1..25: mol_type = other DNA
  misc_feature 1..25: note = SGN005308 Target Sequence
gatttagagtctctcagctggtaca

SEQ ID NO: 402 - DNA, 25 bp, Homo sapiens
  source 1..25: mol_type = other DNA
  misc_feature 1..25: note = SGN005307 Target Sequence
tgtttgagaatcaaaatcggtgaat

SEQ ID NO: 403 - DNA, 25 bp, Homo sapiens
  source 1..25: mol_type = other DNA
  misc_feature 1..25: note = SGN005306 Target Sequence
gacacatttgtttgagaatcaaaat

SEQ ID NO: 404 - DNA, 25 bp, Homo sapiens
  source 1..25: mol_type = other DNA
  misc_feature 1..25: note = SGN005305 Target Sequence
tcttctggaataatgctgttgttga

SEQ ID NO: 405 - DNA, 25 bp, Homo sapiens
  source 1..25: mol_type = other DNA
  misc_feature 1..25: note = SGN005304 Target Sequence
ctgcccttacctgggctggggaaga

SEQ ID NO: 406 - DNA, 25 bp, Homo sapiens
  source 1..25: mol_type = other DNA
  misc_feature 1..25: note = SGN005323 Target Sequence
gcgagcacagctaaggccacggagc

SEQ ID NO: 407 - DNA, 25 bp, Homo sapiens
  source 1..25: mol_type = other DNA
  misc_feature 1..25: note = SGN005321 Target Sequence
gaaagagagagtagcgcgagcacag

SEQ ID NO: 408 - DNA, 25 bp, Homo sapiens
  source 1..25: mol_type = other DNA
  misc_feature 1..25: note = SGN005320 Target Sequence
cacgctggatagcctccaggccaga

SEQ ID NO: 409 - DNA, 25 bp, Homo sapiens
  source 1..25: mol_type = other DNA
  misc_feature 1..25: note = SGN005319 Target Sequence
ctttctggcctggaggctatccagc

SEQ ID NO: 410 - DNA, 25 bp, Homo sapiens
  source 1..25: mol_type = other DNA
  misc_feature 1..25: note = SGN005318 Target Sequence
ctgccgtgtaccagctgagagactc

SEQ ID NO: 411 - DNA, 25 bp, Homo sapiens
  source 1..25: mol_type = other DNA
  misc_feature 1..25: note = SGN005317Target Sequence
gaaccctgaccctgccgtgtaccag

SEQ ID NO: 412 - DNA, 25 bp, Homo sapiens
  source 1..25: mol_type = other DNA
  misc_feature 1..25: note = SGN005333Target Sequence
ggtttcatccatccgacattgaagt

SEQ ID NO: 413 - DNA, 25 bp, Homo sapiens
  source 1..25: mol_type = other DNA
  misc_feature 1..25: note = SGN005332 Target Sequence
gtcatccagcagagaatggaaagtc

SEQ ID NO: 414 - DNA, 25 bp, Homo sapiens
  source 1..25: mol_type = other DNA
  misc_feature 1..25: note = SGN005331 Target Sequence
gccttagctgtgctcgcgctactct

SEQ ID NO: 415 - DNA, 25 bp, Homo sapiens
  source 1..25: mol_type = other DNA
  misc_feature 1..25: note = SGN005330 Target Sequence
ggccttagctgtgctcgcgctactc

SEQ ID NO: 416 - DNA, 25 bp, Homo sapiens
  source 1..25: mol_type = other DNA
  misc_feature 1..25: note = SGN005329 Target Sequence
ttcgggccgagatgtctcgctccgt

SEQ ID NO: 417 - DNA, 25 bp, Homo sapiens
  source 1..25: mol_type = other DNA
  misc_feature 1..25: note = SGN005328 Target Sequence
tgaataggcagacagacttgtcact

SEQ ID NO: 418 - DNA, 25 bp, Homo sapiens
  source 1..25: mol_type = other DNA
  misc_feature 1..25: note = SGN005327 Target Sequence
tcagaatccttactttgtgacacat

SEQ ID NO: 419 - DNA, 25 bp, Homo sapiens
  source 1..25: mol_type = other DNA
  misc_feature 1..25: note = SGN005326 Target Sequence
agtccatagacctcatgtctagcac

SEQ ID NO: 420 - DNA, 25 bp, Homo sapiens
  source 1..25: mol_type = other DNA
  misc_feature 1..25: note = SGN005325 Target Sequence
tcaacaacagcattattccagaaga

SEQ ID NO: 421 - DNA, 25 bp, Homo sapiens
  source 1..25: mol_type = other DNA
  misc_feature 1..25: note = SGN005324 Target Sequence
gtgacaagtctgtctgcctattcac

SEQ ID NO: 422 - DNA, 25 bp, Homo sapiens
  source 1..25: mol_type = other DNA
  misc_feature 1..25: note = SGN005343 Target Sequence
ttccattctctgctggatgacgtga

SEQ ID NO: 423 - DNA, 25 bp, Homo sapiens
  source 1..25: mol_type = other DNA
  misc_feature 1..25: note = SGN005342 Target Sequence
taagtcaacttcaatgtcggatgga

SEQ ID NO: 424 - DNA, 25 bp, Homo sapiens
  source 1..25: mol_type = other DNA
  misc_feature 1..25: note = SGN005341 Target Sequence
ttactcacgtcatccagcagagaat

SEQ ID NO: 425 - DNA, 25 bp, Homo sapiens
  source 1..25: mol_type = other DNA
  misc_feature 1..25: note = SGN005340 Target Sequence
cttttcccgatattcctcaggtact

SEQ ID NO: 426 - DNA, 25 bp, Homo sapiens
  source 1..25: mol_type = other DNA
  misc_feature 1..25: note = SGN005339 and SGN005361 Target Sequence
actcacgctggatagcctccaggcc

SEQ ID NO: 427 - DNA, 25 bp, Homo sapiens
  source 1..25: mol_type = other DNA
  misc_feature 1..25: note = SGN005337 Target Sequence
gctgttgttgaaggcgtttgcacat

SEQ ID NO: 428 - DNA, 25 bp, Homo sapiens
  source 1..25: mol_type = other DNA
  misc_feature 1..25: note = SGN005336 Target Sequence
attttgattctcaaacaaatgtgtc

SEQ ID NO: 429 - DNA, 25 bp, Homo sapiens
  source 1..25: mol_type = other DNA
  misc_feature 1..25: note = SGN005335 Target Sequence
tctgcctattcaccgattttgattc

SEQ ID NO: 430 - DNA, 25 bp, Homo sapiens
  source 1..25: mol_type = other DNA
  misc_feature 1..25: note = SGN005334 Target Sequence
cctgccgtgtaccagctgagagact

SEQ ID NO: 431 - DNA, 25 bp, Homo sapiens
  source 1..25: mol_type = other DNA
  misc_feature 1..25: note = SGN005353 Target Sequence
ttaccccacttaactatcttgggct

SEQ ID NO: 432 - DNA, 25 bp, Homo sapiens
  source 1..25: mol_type = other DNA
  misc_feature 1..25: note = SGN005352 Target Sequence
ccgtgtgaaccatgtgactttgtca

SEQ ID NO: 433 - DNA, 25 bp, Homo sapiens
  source 1..25: mol_type = other DNA
  misc_feature 1..25: note = SGN005351 Target Sequence
ctcacgtcatccagcagagaatgga

SEQ ID NO: 434 - DNA, 25 bp, Homo sapiens
  source 1..25: mol_type = other DNA
  misc_feature 1..25: note = SGN005350 Target Sequence
tgtcttttcccgatattcctcaggt

SEQ ID NO: 435 - DNA, 25 bp, Homo sapiens
  source 1..25: mol_type = other DNA
  misc_feature 1..25: note = SGN005349 Target Sequence
gtgtcttttcccgatattcctcagg

SEQ ID NO: 436 - DNA, 25 bp, Homo sapiens
  source 1..25: mol_type = other DNA
  misc_feature 1..25: note = SGN005348 Target Sequence
cttactttgtgacacatttgtttga

SEQ ID NO: 437 - DNA, 25 bp, Homo sapiens
  source 1..25: mol_type = other DNA
  misc_feature 1..25: note = SGN005347 Target Sequence
aatgctgttgttgaaggcgtttgca

SEQ ID NO: 438 - DNA, 25 bp, Homo sapiens
  source 1..25: mol_type = other DNA
  misc_feature 1..25: note = SGN005346 Target Sequence
ccgattttgattctcaaacaaatgt

SEQ ID NO: 439 - DNA, 25 bp, Homo sapiens
  source 1..25: mol_type = other DNA
  misc_feature 1..25: note = SGN005345 Target Sequence
ctgcctattcaccgattttgattct

SEQ ID NO: 440 - DNA, 25 bp, Homo sapiens
  source 1..25: mol_type = other DNA
  misc_feature 1..25: note = SGN005344 Target Sequence
ctgtctgcctattcaccgattttga

SEQ ID NO: 441 - DNA, 25 bp, Homo sapiens
  source 1..25: mol_type = other DNA
  misc_feature 1..25: note = SGN005363 Target Sequence
agagagagtagcgcgagcacagcta

SEQ ID NO: 442 - DNA, 25 bp, Homo sapiens
  source 1..25: mol_type = other DNA
  misc_feature 1..25: note = SGN005362 Target Sequence
tccaggccagaaagagagagtagcg

SEQ ID NO: 443 - DNA, 25 bp, Homo sapiens
  source 1..25: mol_type = other DNA
  misc_feature 1..25: note = SGN005360 Target Sequence
gagagactcacgctggatagcctcc

SEQ ID NO: 444 - DNA, 25 bp, Homo sapiens
  source 1..25: mol_type = other DNA
  misc_feature 1..25: note = SGN005358 Target Sequence
gtgctgtggcctggagcaacaaatc

SEQ ID NO: 445 - DNA, 25 bp, Homo sapiens
  source 1..25: mol_type = other DNA
  misc_feature 1..25: note = SGN005357 Target Sequence
caaatgtgtcacaaagtaaggattc

SEQ ID NO: 446 - DNA, 25 bp, Homo sapiens
  source 1..25: mol_type = other DNA
  misc_feature 1..25: note = SGN005356 Target Sequence
ctgaccctgccgtgtaccagctgag

SEQ ID NO: 447 - DNA, 25 bp, Homo sapiens
  source 1..25: mol_type = other DNA
  misc_feature 1..25: note = SGN005355 and SGN005407 Target Sequence
cttgtcccacagatatccagaaccc

SEQ ID NO: 448 - DNA, 25 bp, Homo sapiens
  source 1..25: mol_type = other DNA
  misc_feature 1..25: note = SGN005372 Target Sequence
acggcaggcatactcatctttttca

SEQ ID NO: 449 - DNA, 25 bp, Homo sapiens
  source 1..25: mol_type = other DNA
  misc_feature 1..25: note = SGN005371 Target Sequence
acacggcaggcatactcatcttttt

SEQ ID NO: 450 - DNA, 25 bp, Homo sapiens
  source 1..25: mol_type = other DNA
  misc_feature 1..25: note = SGN005370 Target Sequence
atgtaagacttaccccacttaacta

SEQ ID NO: 451 - DNA, 25 bp, Homo sapiens
  source 1..25: mol_type = other DNA
  misc_feature 1..25: note = SGN005369 Target Sequence
gactttgtcacagcccaagatagtt

SEQ ID NO: 452 - DNA, 25 bp, Homo sapiens
  source 1..25: mol_type = other DNA
  misc_feature 1..25: note = SGN005368 Target Sequence
agtcaaatttcctgaattgctatgt

SEQ ID NO: 453 - DNA, 25 bp, Homo sapiens
  source 1..25: mol_type = other DNA
  misc_feature 1..25: note = SGN005364 Target Sequence
gaagacaccttcttccccagcccag

SEQ ID NO: 454 - DNA, 25 bp, Homo sapiens
  source 1..25: mol_type = other DNA
  misc_feature 1..25: note = SGN005382 and SGN005402 Target Sequence
ctctctttctggcctggaggctatc

SEQ ID NO: 455 - DNA, 25 bp, Homo sapiens
  source 1..25: mol_type = other DNA
  misc_feature 1..25: note = SGN005381,  SGN005391, and SGN005401 Target Sequence
ccgagatgtctcgctccgtggcctt

SEQ ID NO: 456 - DNA, 25 bp, Homo sapiens
  source 1..25: mol_type = other DNA
  misc_feature 1..25: note = SGN005380,  SGN005390, and SGN005400 Target Sequence
acagcattcgggccgagatgtctcg

SEQ ID NO: 457 - DNA, 25 bp, Homo sapiens
  source 1..25: mol_type = other DNA
  misc_feature 1..25: note = SGN005379, SGN005389, and SGN005399 Target Sequence
acacggcagggtcagggttctggat

SEQ ID NO: 458 - DNA, 25 bp, Homo sapiens
  source 1..25: mol_type = other DNA
  misc_feature 1..25: note = SGN005378,  SGN005388, and SGN005398 Target Sequence
gtgacacatttgtttgagaatcaaa

SEQ ID NO: 459 - DNA, 25 bp, Homo sapiens
  source 1..25: mol_type = other DNA
  misc_feature 1..25: note = SGN005377,  SGN005387, and SGN005397 Target Sequence
agctgcccttacctgggctggggaa

SEQ ID NO: 460 - DNA, 25 bp, Homo sapiens
  source 1..25: mol_type = other DNA
  misc_feature 1..25: note = SGN005376,  SGN005386, and SGN005396 Target Sequence
cgtgtaccagctgagagactctaaa

SEQ ID NO: 461 - DNA, 25 bp, Homo sapiens
  source 1..25: mol_type = other DNA
  misc_feature 1..25: note = SGN005375,  SGN005385, and SGN005395 Target Sequence
ccacagatatccagaaccctgaccc

SEQ ID NO: 462 - DNA, 25 bp, Homo sapiens
  source 1..25: mol_type = other DNA
  misc_feature 1..25: note = SGN005373,  SGN005383, and SGN005393 Target Sequence
tagcctccaggccagaaagagagag

SEQ ID NO: 463 - DNA, 25 bp, Homo sapiens
  source 1..25: mol_type = other DNA
  misc_feature 1..25: note = SGN005392 and SGN005412 Target Sequence
ctccaaagattcaggtttactcacg

SEQ ID NO: 464 - DNA, 25 bp, Homo sapiens
  source 1..25: mol_type = other DNA
  misc_feature 1..25: note = SGN005406 Target Sequence
tttaggttcgtatctgtaaaaccaa

SEQ ID NO: 465 - DNA, 51 bp, synthetic construct
  source 1..51: mol_type = other DNA
  misc_feature 1..51: note = B2M_ex1 705/706 FWD Primer
tcgtcggcagcgtcagatgtgtataagagacagcgggcattcctgaagctg

SEQ ID NO: 466 - DNA, 53 bp, synthetic construct
  source 1..53: mol_type = other DNA
  misc_feature 1..53: note = B2M_ex1 705/706 REV Primer
gtctcgtgggctcggagatgtgtataagagacaggtaggccaaaggtctcccc

SEQ ID NO: 467 - DNA, 53 bp, synthetic construct
  source 1..53: mol_type = other DNA
  misc_feature 1..53: note = B2M_ex2 707/700 FWD Primer
tcgtcggcagcgtcagatgtgtataagagacagcttgacaccaagttagcccc

SEQ ID NO: 468 - DNA, 55 bp, synthetic construct
  source 1..55: mol_type = other DNA
  misc_feature 1..55: note = B2M_ex2 707/700 REV Primer
gtctcgtgggctcggagatgtgtataagagacagtcatacacaactttcagcagc

SEQ ID NO: 469 - DNA, 52 bp, synthetic construct
  source 1..52: mol_type = other DNA
  misc_feature 1..52: note = DNMT3a-Ex14 FWD Primer
tcgtcggcagcgtcagatgtgtataagagacagtggagtgtgtggacctctt

SEQ ID NO: 470 - DNA, 54 bp, synthetic construct
  source 1..54: mol_type = other DNA
  misc_feature 1..54: note = DNMT3a-Ex14 REV Primer
gtctcgtgggctcggagatgtgtataagagacaggtgagcacaacaggtcagat

SEQ ID NO: 471 - DNA, 53 bp, synthetic construct
  source 1..53: mol_type = other DNA
  misc_feature 1..53: note = DNMT3a-Ex6 FWD Primer
tcgtcggcagcgtcagatgtgtataagagacagactgttccgggttttgacaa

SEQ ID NO: 472 - DNA, 54 bp, synthetic construct
  source 1..54: mol_type = other DNA
  misc_feature 1..54: note = DNMT3a-Ex6 REV Primer
gtctcgtgggctcggagatgtgtataagagacagtcgtactctggctcgtcatc

SEQ ID NO: 473 - DNA, 53 bp, synthetic construct
  source 1..53: mol_type = other DNA
  misc_feature 1..53: note = DNMT3a-Ex7 FWD Primer
tcgtcggcagcgtcagatgtgtataagagacaggcctcattcagatggagctc

SEQ ID NO: 474 - DNA, 54 bp, synthetic construct
  source 1..54: mol_type = other DNA
  misc_feature 1..54: note = DNMT3a-Ex7 REV Primer
gtctcgtgggctcggagatgtgtataagagacagccaaaccccacaacttacca

SEQ ID NO: 475 - DNA, 53 bp, synthetic construct
  source 1..53: mol_type = other DNA
  misc_feature 1..53: note = DNMT3a-Ex8 FWD Primer
tcgtcggcagcgtcagatgtgtataagagacagtcactgtatctggtcccctc

SEQ ID NO: 476 - DNA, 54 bp, synthetic construct
  source 1..54: mol_type = other DNA
  misc_feature 1..54: note = DNMT3a-Ex8 REV Primer
gtctcgtgggctcggagatgtgtataagagacagaggtggagagaaaggagtcg

SEQ ID NO: 477 - DNA, 53 bp, synthetic construct
  source 1..53: mol_type = other DNA
  misc_feature 1..53: note = TRAC_ex1 713/714 FWD Primer
tcgtcggcagcgtcagatgtgtataagagacaggggcaaagagggaaatgaga

SEQ ID NO: 478 - DNA, 54 bp, synthetic construct
  source 1..54: mol_type = other DNA
  misc_feature 1..54: note = TRAC_ex1 713/714 REV Primer
gtctcgtgggctcggagatgtgtataagagacaggaacctggccattcctgaag

SEQ ID NO: 479 - DNA, 53 bp, synthetic construct
  source 1..53: mol_type = other DNA
  misc_feature 1..53: note = TRAC1-4 FWD Primer
tcgtcggcagcgtcagatgtgtataagagacagactcactaaggggcccatct

SEQ ID NO: 480 - DNA, 54 bp, synthetic construct
  source 1..54: mol_type = other DNA
  misc_feature 1..54: note = TRAC1-4 REV Primer
gtctcgtgggctcggagatgtgtataagagacagcaggaggaggattcggaacc

SEQ ID NO: 481 - protein, 192 aa, synthetic construct
  REGION 1..192: note = APG00868 deaminase
MEPWRPSPRNPMDRIDPNTFRFHFPNLLYASGRKLCYLCFQVETGDYFSCDDSDRGVFRNKVHPWARCHAEQCFLSWFRDQYPCRDEYYNVTWFLSWSPCPTCAEEVVEFLEEYRNLTLSIFTSRLYYFYHPNYQQGLRKLWDAGVQLDIMSCDDFEHCWDNFVDHKGMRFQRRNLLKDYDFLAAELQEILR

SEQ ID NO: 482 - protein, 373 aa, synthetic construct
  REGION 1..373: note = APG02316 deaminase
MIENPALKISKRDRIKISNLKDLKNALKNENYNIKANDKEKFKDEVKKVFNINDDIFERLDKCLNRDITYKVDNVEDFIDYIKKIMIFEDKHEIICEKLKRIKKLYINREEYEREKSTRDNVEHIIEVIEKTKENVSRKISLEELERLEILEEELEDKYLFAKDIEFLKKMILGNCKNVIESYNEKTKIKTLKMKIPKEINYSYIKAKEGSVEYHQYLNNNINRMNRLIKSIDKYIEHYKDDIFNINQSLALQDSINIALATFDNKEFKAISGKNDIEDYCKVIPIEKSRFKSRKVNKLGELGIGYNRINDSEKKILEEIHEKIKQKILKDRGNLTLYTKWEPCPSCYFVISQFCEKYPNIKVEVKYNKKYGE

SEQ ID NO: 483 - protein, 235 aa, synthetic construct
  REGION 1..235: note = APG05241 deaminase
MNSKTGPSVGDATLRRRIKPWEFVAFFNPQELRKETCLLYEIKWGNQNIWRHSNQNTSQHAEINFMEKFTAERHFNSSVRCSITWFLSWSPCWECSKAIRKFLDHYPNVTLAIFISRLYWHMDQQHRQGLKELVHSGVTIQIMSYSEYHYCWRNFVDYPQGEEDYWPKYPYLWIMLYVLELHCIILGLPPCLKISGSHSNQLALFSLDLQDCHYQKIPYNVLVATGLVQPFVTWR

SEQ ID NO: 484 - protein, 201 aa, synthetic construct
  REGION 1..201: note = APG05840 deaminase
MEASPASRPRPLMDPHMFTGNFTNNPRVFGLHQTYLCYEVKRQGPDGTRDLMNEQRDFLCNQAKNHFSGSEDHHAERCFLDRIPSWQLDPAQTYRVTCFISWSPCFSCAQEVAEFLHENPHVNLRIFAARIYDYLPRYEEGLQMLQNAGAQVSIMTSEEFGHCWDTFVDRQGHPFQPWEGLDEHSQALSGRLQAILQNQGN

SEQ ID NO: 485 - protein, 262 aa, synthetic construct
  REGION 1..262: note = APG07280 deaminase
MHHSARLPPNCIVSRYANAPWTVLPLPLPPTEAPATGDDTLRRRIEPWEFEAFFNPQELRREACLLYQITWSSHKVWRETAKNTVDSHVEVNFIQNLTAGRYCRPSTRCSILWFLSWSPCSSCSKAIRLFLSQHPGVSLVIYVARLFQHMDPQNRQGLRELIHSGVTIQVMRPQEYDYCWKNFVNYPPGQEEHWPRYPVQCMTLYNLELYCIIHNLPPCVRISKQRQSQLAFFSLGLENVHYQRIPPPLLLLTGLVFVFPWK

SEQ ID NO: 486 - protein, 395 aa, synthetic construct
  REGION 1..395: note = APG07386 deaminase
MNPQIRNPMEGMDRHAFNYNFENEPILYGRSYTWLCYEVKIRKDPSKLPWDTGVFRGQVRPKLQSNRRYELSNWECRKHVYFQPQYHAEMCFLSWFCGNQLPAHKRFQITWFVSWTPCPDCVAKVTEFLAEHPNVTLTISVARLYYYRGKDWRRALCRLHQAGARVKIMDYEEFAYCWENFVYNEGQSFMPWDKFDDNYAFLHHKLKEILRNPMEATYPHIFYFHFKNLRKAYGRNETWLCFTMEIIKQHSTVFWETGVFRNQVYPESLCHAERCFLSWFCEDILSPNTDYRVTWYTSWSPCLDCAGEVAEFLARHSNVKLAIFAARLYYFWDPHYQQGLRSLSEKGASVEIMGYKDFKYCWENFVYNGDEPFKPWKGLKYNFLFLDSKLQEILQ

SEQ ID NO: 487 - protein, 234 aa, synthetic construct
  REGION 1..234: note = APG08360 deaminase
MDPQRLRQWPGPGPASRGGYGQRPRIRNPEEWFHELSPRTFSFHFRNLRFASGRNRSYICCQVEGKNCFFQGIFQNQKKRHAEIRFIDKINSLNLDQNQCYRIICYVTWSPCHNCAKELVDFISNRHHLSLQLFASRLYFHWVRCYQRGLQRLQANRVSVAVMKGPEFKDCWEKFVDHQGESFPSWEKLEQYSESISRRLSRILRFANQNNLEDSFRDLRLGSPSPSSSRSDSR

SEQ ID NO: 488 - protein, 211 aa, synthetic construct
  REGION 1..211: note = APG09260 deaminase
MEDFHCVCVYCPLQVSVMSDYQAASSSPDCPQCPQHILTGAEAAVSYSQFCETFGFHMGPSGARALLLFYELWGPSGTLVQRGQASNLLEVCEEVLYSNYMPCQECSQTLISFLLRYPWVRLDLLFSQLYHTAPSQTHSLDNQTGLRSLAVLTLSPNSGAAWGHLLRCFVRDVPPSALQLPLLPERVEADRVNAIHISATTGIGPAFWTSH

SEQ ID NO: 489 - protein, 267 aa, synthetic construct
  REGION 1..267: note = APG09688 deaminase
MGTPKDTKSRHLAGRCHELHNSRGRSPESDTMASEKGPSNKDYTLRRRIEPWEFEVFFDPQELRKEACLLYEIKWGASSKTWRSSGKNTTNHVEVNFLEKLTSEGRLGPSTCCSITWFLSWSPCWECSTAIREFLSQHPGVTLVIFVARLFQHMDRRNRQGLKDLVTSGVTVQVMSVSEYCYCWENFVNYPPGKAAQWPRYPPRWMLMYALELYCIILGLPPCLKISRRHQKQLTFFSLTPQYCHYKMIPPYILLATGLLQPSVPWR

SEQ ID NO: 490 - protein, 230 aa, synthetic construct
  REGION 1..230: note = APG09980 deaminase
MAAGPAPEARSLMDEQTFLDNFNNLKYPRKTYLCYEVELLVGENHIPLDDYKGFVHNEGFDMGLERCHAELIFLERMASWNLDTELRYRITVFISWSPCPECADELVKFLRENRHVNLRIFAARIYDWYQGYEAGLRALKAAGAEVAMMTLHEFEYCWNNFVDHQQDEDTPFPPWDNLVARSEELSQRLEGILQPSVLVFCWPSQVSVTAAHSDIMSQASRAWEKRRDPP

SEQ ID NO: 491 - protein, 169 aa, synthetic construct
  REGION 1..169: note = APG09982 deaminase
MSDLELNHEYWMRHALQLAKRARDEGEVPVGAVLVLNNQVIGEGWNRAIGLHDPTAHAEIMALRQGGLVLQNYRLYDTTLYSTFEPCVMCSGAMVHSRIGTLVFGVRNEKTGAAGSLMDVLRHPGMNHQVQIIDGVLAPECSGLLCRFFRMPRRVFNQQKAESTSSPGD

SEQ ID NO: 492 - protein, 164 aa, synthetic construct
  REGION 1..164: note = APG03724 deaminase
MSNPELTHEHWMRYALTLAKRAREEGEVPVGAVLVLNNQVIGEGWNRAIGLHDPTAHAEIMALRQGGLVLQNYRLYDTTLYSTFEPCVMCAGAMVHSRIGQLVFGVRNAKTGAAGSLMDVLHHPGMNHRIEFTEGVLRDECAAMLCRFFRQPRRVFNALKTGNA

SEQ ID NO: 493 - protein, 169 aa, synthetic construct
  REGION 1..169: note = APG09949 deaminase
MSIPELNHDVWMRHALTLAKRAREEGEVPVGAVLVLNGQVIGEGWNRAIGLHDPTAHAEIMALRQGGLVLQNYRLYDTTLYSTFEPCVMCAGAMVHSRIGQLVFGVRNAKTGAAGSLIDVLHHPGMNHRVAITEGVLREECAAMLCRFFRQPRRVFNALKKPAGDPTAF

SEQ ID NO: 494 - protein, 172 aa, synthetic construct
  REGION 1..172: note = APG08196 deaminase
MSNPELNHEYWMRYALTLAKRARDEGEVPVGAVLVLNDQVIGEGWNRAIGLHDPTAHAEIMALRQGGLVLQNYRLYDTTLYSTFEPCVMCAGAMVHSRIGRLVFGVRNAKTGAAGSLLDVLHHPGMNHHIEMEEGVLRDECAAMLCRFFRQPRRVFNALKKSPPDSPNLQAR

SEQ ID NO: 495 - protein, 169 aa, synthetic construct
  REGION 1..169: note = APG06333 deaminase
MSNPELTHDHWMRHALTLAQRARNEGEVPVGAVLVLNGQVIGEGWNRAIGLHDPTAHAEIMALRQGGLVLQNYRLYDTVLYSTFEPCVMCAGAMVHSRIGQLVFGVRNAKTGAAGSLIDVLHHPGMNHRVEIIEGVLRDECAAMLCRFFRHPRRVFNALKKNAGTSPTQ

SEQ ID NO: 496 - protein, 166 aa, synthetic construct
  REGION 1..166: note = APG06489 deaminase
MSDTELNHEYWMRHALMLAKRARDEGEVPVGAVLVLKNQVIGEGWNRAIGLHDPTAHAEIMALRQGGLVLQNYRLYDTTLYSTFEPCVMCAGAMVHSRIGNLVFGVRNAKTGAAGSLIDVLHHPGMNHRVEIAEGVLADECSAMLCRFFRHPRRVFNALKQAAKHD

SEQ ID NO: 497 - protein, 171 aa, synthetic construct
  REGION 1..171: note = APG08449 deaminase
MSDIELNHEYWMRHALMLAKRAREEGEVPVGAVLVLNNQVIGEGWNRAIGLHDPTAHAEIMALRQGGLVLQNYRLYDTTLYSTFEPCVMCAGAMVHSRIGHLVFGVRNAKTGAAGSLIDVLHHPGMNHRIEFTEGVLADECSGMLCRFFRYPRRVFNTLKQAAKANPPAAQ

SEQ ID NO: 498 - protein, 173 aa, synthetic construct
  REGION 1..173: note = APG05174 deaminase
MSIPELNHDVWMRHALTLAKRAREEGEVPVGAVLVLNGQVIGEGWNRAIGLHDPTAHAEIMALRQGGLVLQNYRLYDTTLYSTFEPCVMCAGAMVHSRIGQLVFGVRNAKTGAAGSLMDVLHHPGMNHRVEITEGVLRDECAAMLCRFFRQPRRVFNALKKPAGDPSALQNNR

SEQ ID NO: 499 - protein, 168 aa, synthetic construct
  REGION 1..168: note = APG09102 deaminase
MSNPEFTHEYWMRHALTLARRARDEGEVPVGAVLVLNNQVIGEGWNRAIGLHDPTAHAEIMALRQGGLVLQNYRLYDTTLYSTFEPCVMCSGAMVHSRIGTLVFGVRNEKTGAAGSLMDVLGHPGMNHQVKTIGGVLAPECSGLLCRFFRMPRRVFNQQKAELKSSGD

SEQ ID NO: 500 - protein, 167 aa, synthetic construct
  REGION 1..167: note = APG05723 deaminase
MSDAELTHEYWMRHALTLAQRARDEGEVPVGAVLVLNNQVIGEGWNRAIGLHDPTAHAEIMALRQGGLVQQNYRLYDTTLYSTFEPCVMCAGAMVHSRIGRLIFGVRNAKTGAAGSLIDVLHHPGMNHRVEVVEGILRDECAGMLCRFFRQPRRVFNALKKGATDVL

SEQ ID NO: 501 - protein, 169 aa, synthetic construct
  REGION 1..169: note = LPG50140 deaminase
MSDLELNHEYWMRHALQLAKRARDEGEVPVGAVLVLNNQVIGEGWNRAIGLHDPTAHAEIMALRQGGLVLQNYRLIDTTLYVTFEPCVMCSGAMVHSRIGTLVFGVRNSKRGAAGSLMNVLNYPGMNHQVQIIDGVLAPECSGLLCDFYRMPRQVFNQQKAESTSINGD

SEQ ID NO: 502 - protein, 164 aa, synthetic construct
  REGION 1..164: note = LPG50141 deaminase
MSNPELTHEHWMRYALTLAKRAREEGEVPVGAVLVLNNQVIGEGWNRAIGLHDPTAHAEIMALRQGGLVLQNYRLIDTTLYVTFEPCVMCAGAMVHSRIGQLVFGVRNSKRGAAGSLMNVLNYPGMNHRIEFTEGVLRDECAAMLCDFYRQPRQVFNALKTGNA

SEQ ID NO: 503 - protein, 169 aa, synthetic construct
  REGION 1..169: note = LPG50142 deaminase
MSIPELNHDVWMRHALTLAKRAREEGEVPVGAVLVLNGQVIGEGWNRAIGLHDPTAHAEIMALRQGGLVLQNYRLIDTTLYVTFEPCVMCAGAMVHSRIGQLVFGVRNSKRGAAGSLINVLNYPGMNHRVAITEGVLREECAAMLCDFYRQPRQVFNALKKPAGDINAF

SEQ ID NO: 504 - protein, 172 aa, synthetic construct
  REGION 1..172: note = LPG50143 deaminase
MSNPELNHEYWMRYALTLAKRARDEGEVPVGAVLVLNDQVIGEGWNRAIGLHDPTAHAEIMALRQGGLVLQNYRLIDTTLYVTFEPCVMCAGAMVHSRIGRLVFGVRNSKRGAAGSLLNVLNYPGMNHHIEMEEGVLRDECAAMLCDFYRQPRQVFNALKKSPPDINNLQAR

SEQ ID NO: 505 - protein, 169 aa, synthetic construct
  REGION 1..169: note = LPG50144 deaminase
MSNPELTHDHWMRHALTLAQRARNEGEVPVGAVLVLNGQVIGEGWNRAIGLHDPTAHAEIMALRQGGLVLQNYRLIDTVLYVTFEPCVMCAGAMVHSRIGQLVFGVRNSKRGAAGSLINVLNYPGMNHRVEIIEGVLRDECAAMLCDFYRHPRQVFNALKKNAGTINTQ

SEQ ID NO: 506 - protein, 166 aa, synthetic construct
  REGION 1..166: note = LPG50145 deaminase
MSDTELNHEYWMRHALMLAKRARDEGEVPVGAVLVLKNQVIGEGWNRAIGLHDPTAHAEIMALRQGGLVLQNYRLIDTTLYVTFEPCVMCAGAMVHSRIGNLVFGVRNSKRGAAGSLINVLNYPGMNHRVEIAEGVLADECSAMLCDFYRHPRQVFNALKQAAKHI

SEQ ID NO: 507 - protein, 171 aa, synthetic construct
  REGION 1..171: note = LPG50146 deaminase
MSDIELNHEYWMRHALMLAKRAREEGEVPVGAVLVLNNQVIGEGWNRAIGLHDPTAHAEIMALRQGGLVLQNYRLIDTTLYVTFEPCVMCAGAMVHSRIGHLVFGVRNSKRGAAGSLINVLNYPGMNHRIEFTEGVLADECSGMLCDFYRYPRQVFNTLKQAAKAINPAAQ

SEQ ID NO: 508 - protein, 173 aa, synthetic construct
  REGION 1..173: note = LPG50147 deaminase
MSIPELNHDVWMRHALTLAKRAREEGEVPVGAVLVLNGQVIGEGWNRAIGLHDPTAHAEIMALRQGGLVLQNYRLIDTTLYVTFEPCVMCAGAMVHSRIGQLVFGVRNSKRGAAGSLMNVLNYPGMNHRVEITEGVLRDECAAMLCDFYRQPRQVFNALKKPAGDINALQNNR

SEQ ID NO: 509 - protein, 168 aa, synthetic construct
  REGION 1..168: note = LPG50148 deaminase
MSNPEFTHEYWMRHALTLARRARDEGEVPVGAVLVLNNQVIGEGWNRAIGLHDPTAHAEIMALRQGGLVLQNYRLIDTTLYVTFEPCVMCSGAMVHSRIGTLVFGVRNSKRGAAGSLMNVLNYPGMNHQVKTIGGVLAPECSGLLCDFYRMPRQVFNQQKAELKSIND

SEQ ID NO: 510 - protein, 167 aa, synthetic construct
  REGION 1..167: note = LPG50149 deaminase
MSDAELTHEYWMRHALTLAQRARDEGEVPVGAVLVLNNQVIGEGWNRAIGLHDPTAHAEIMALRQGGLVQQNYRLIDTTLYVTFEPCVMCAGAMVHSRIGRLIFGVRNSKRGAAGSLINVLNYPGMNHRVEVVEGILRDECAGMLCDFYRQPRQVFNALKKGATDIN

SEQ ID NO: 511 - protein, 167 aa, synthetic construct
  REGION 1..167: note = LPG50150 deaminase
MSDAELTHEYWMRHALTLAQRARDEGEVPVGAVLVLNNQVIGEGWNRAIGLHDPTAHAEIMALRQGGLVQQNYRLLDTTLYVTFEPCVMCAGAMVHSRIGRLIFGVRNSKRGAAGSLINVLNYPGMNHRVEVVEGILRDECAGMLCAFYRQPRAVKNALKKGATDVL

SEQ ID NO: 512 - protein, 169 aa, synthetic construct
  REGION 1..169: note = LPG50151 deaminase
MSDLELNHEYWMRHALQLAQRARDEGEVPVGAVLVYNNQVIGEGWNRAIGLHDPTAHAEIMALRQGGLVLQNYRLLDTTLYVTFEPCVMCSGAMVHSRIGTLVFGVRNEKRGAAGSLMNVLRYPGMNHQVQIIDGVLAPECSGLLCDFYRMPRQQKNQQKAESTSSPGD

SEQ ID NO: 513 - protein, 167 aa, synthetic construct
  REGION 1..167: note = LPG50152 deaminase
MSDNELNHEYWMRHALGLAKRAREEGEVPVGAVLVLNNQVIGEGWNRAIGLHDPTAHAEIMALRQGGLVLQNYRLTDTTLYVTFEPCVMCAGAMVHSRIGTLVFGVRNSKRGAAGSLMNVLNYPGMNHRVEIVEGILSESCAAMLCDFYRQPRAVKNALKKAADPAA

SEQ ID NO: 514 - protein, 164 aa, synthetic construct
  REGION 1..164: note = LPG50153 deaminase
MSDTEFTHEHWMRHALTLAQRARDEGEVPVGAVLVLNNQVIGEGWNRAIGLHDPTAHAEIMALRQGGLVLQNYRLLDTTLYVTFEPCVMCAGAMVHSRIGHLVFGVRNSKRGAIGSLMNVLGYPGMNHQVQVSEGVLATECSAMLCDFYRAPRLVKNALKEKAR

SEQ ID NO: 515 - protein, 171 aa, synthetic construct
  REGION 1..171: note = LPG50154 deaminase
MSESEFTHEHWMRHALTLARRAREEGEVPVGAVLVLNNQVIGEGWNRAIGLHDPTAHAEIMALRQGGLVLQNYRLLDSTLYVTFEPCVMCAGAMVHGRIGNLVFGVRNSKRGAIGSLMNVVGYPGMNHQINVIEGVLAEECSAMLCDFYRAPRLVKNALKEKARNGNNPNK

SEQ ID NO: 516 - protein, 164 aa, synthetic construct
  REGION 1..164: note = LPG50155 deaminase
MSNPELTHEHWMRYALTLAKRAREEGEVPVGAVLVLNNQVIGEGWNRAIGLHDPTAHAEIMALRQGGLVLQNYRLIDTTLYVTFEPCVMCAGAMVHSRIGQLVFGVRNSKRGAAGSLMNVLNYPGMNHRIEFTEGVLRDECAAMLCDFYRQPRLVKNALKTGNA

SEQ ID NO: 517 - protein, 166 aa, synthetic construct
  REGION 1..166: note = LPG50156 deaminase
MSDPELNHEYWMRHALQLAKRAREEGEVPVGAVLVLNNQVIGEGWNRAIGLHDPTAHAEIMALRQGGLVLQNYRLLDTTLYVTFEPCVMCSGAMIHSRIGTVVFGVRNEKRGAAGSLLNVLRYPGMNHQVNVLGGVLAPACSEMLCEFYRMPRQQKNRQKAESKLS

SEQ ID NO: 518 - protein, 166 aa, synthetic construct
  REGION 1..166: note = LPG50157 deaminase
MSDNELNHEHWMRHALTLAQRAREEGEVPVGAVLVLQNQVIGEGWNRAIGLHDPTAHAEIMALRQGGMVLQNYRLIDTTLYVTFEPCVMCAGAMVHSRIGQLVFGVRNSKRGAAGSLINVLNYPGMNHRVEITEGVLADDCSSMLCDFYRHPREQKNALKRAAHSN

SEQ ID NO: 519 - protein, 168 aa, synthetic construct
  REGION 1..168: note = LPG50158 deaminase
MSNPEHNHEYWMRHALTLAQRARDEGEVPVGAVLVYNNQVIGEGWNRAIGLHDPTAHAEIMALRQGGLVLQNYRLLDTTLYVTFEPCVMCSGAMVHSRIGTLVFGVRNEKRGAAGSLMNVLGYPGMNHQVQTIGGVLAPECSGLLCDFYRMPRQQKNQQKAELNQPGD

SEQ ID NO: 520 - protein, 168 aa, synthetic construct
  REGION 1..168: note = LPG50159 deaminase
MSDLELNHEYWMRHALSLAKRARDEGEVPVGAVLVLNNQVIGEGWNRAIGLHDPTAHAEIMALRQGGLVLQNYRLLDTTLYVTFEPCVMCSGAMVHSRIGTLVYGVRNEKRGAAGSLMNVLGYPGMNHQVQIIGGVLAPDCSGLLCDFYRMPRQQKNQQKAELKSSGD

SEQ ID NO: 521 - protein, 166 aa, synthetic construct
  REGION 1..166: note = LPG50160 deaminase
MSDHEFNDEYWMRHALTLAKRAREEGEVPVGAVLVLNNQVIGEGWNRAIGLHDPTAHAEIMALRQGGLVLQNYRLIDATLYVTFEPCVMCAGAMVHSRISRLVFGVRNSKRGAAGSLINVLNYPGMNHRVEITEGILAESCSAMLCDFYRWPREVKNALKKARQEE

SEQ ID NO: 522 - protein, 166 aa, synthetic construct
  REGION 1..166: note = LPG50161 deaminase
MSQTELTHEYWMRHALTLAQRARDEGEVPVGAVLVLNNQVIGEGWNRAIGLHDPTAHAEIMALRQGGLVLQNYRLLDTTLYVTFEPCVMCAGAMVHGRIGTLVFGVRNSKRGAVGSLMNITGYPGMNHQVQVIEGILATECSAMLCAFYRQPRLVKNALKEAAKTA

SEQ ID NO: 523 - protein, 167 aa, synthetic construct
  REGION 1..167: note = LPG50162 deaminase
MSNPELNHDYWMRHALSLAKRAREEGEVPVGAVLVRNNEVIGEGWNRAIGLHDPTAHAEIMALRQGGMVLQNYRLIDTTLYVTFEPCVMCAGAMVHSRIGQLVFGVRNSKRGAAGSLMNVLNYPGMNHRVEIVEGVLRDECAGMLCDFYRQPRLVKNAQKKGAEPLI

SEQ ID NO: 524 - protein, 172 aa, synthetic construct
  REGION 1..172: note = LPG50163 deaminase
MSNPELNHEYWMRYALTLAKRARDEGEVPVGAVLVYNDQVIGEGWNRAIGLHDPTAHAEIMALRQGGLVLQNYRLIDTTLYVTFEPCVMCAGAMVHSRIGRLVFGVRNSKRGAAGSLLNVLNYPGMNHHIEMEEGVLRDECAAMLCDFYRQPRMVKNALKKSPPDSPNLQAR

SEQ ID NO: 525 - protein, 168 aa, synthetic construct
  REGION 1..168: note = LPG50164 deaminase
MSNPEFTHEYWMRHALTLARRARDEGEVPVGAVLVLNNQVIGEGWNRAIGLHDPTAHAEIMALRQGGLVLQNYRLLDTTLYVTFEPCVMCSGAMVHSRIGTLVFGVRNEKRGAAGSLMNVLGYPGMNHQVKTIGGVLAPECSGLLCDFYRMPRQQKNQQKAELKSSGD

SEQ ID NO: 526 - protein, 165 aa, synthetic construct
  REGION 1..165: note = LPG50165 deaminase
MSDNEFNHEYWMRHALTLAQRARDEGEVPVGAVLVLDNQVIGEGWNRAIGLHDPTAHAEIMALRQGGMVLQNYRLINATLYVTFEPCVMCAGAMVHSRIGHVVFGVRNSKRGAAGSLMNVLNYPGMNHRVEVTEGVLREQCAGMLCDFYREPREQFNALRKAQKA

SEQ ID NO: 527 - protein, 170 aa, synthetic construct
  REGION 1..170: note = LPG50166 deaminase
MSDNELNHEYWMRHALTLAQRARDEGEVPVGAVLVLNNQVIGEGWNRAIGLHDPTAHAEIMALRQGGMVLQNYRLIDATLYVTFEPCIMCAGAMVHSRIGQVVFGVRNSKRGAAGSLINILNYPGMNHRVDVTEGVLSERCANMLCDFYREPRLQFNAQRKAEKAGNAAA

SEQ ID NO: 528 - protein, 169 aa, synthetic construct
  REGION 1..169: note = LPG50167 deaminase
MSNPELTHDHWMRHALTLAQRARNEGEVPVGAVLVLNGQVIGEGWNRAIGLHDPTAHAEIMALRQGGLVLQNYRLIDTVLYVTFEPCVMCAGAMVHSRIGQLVFGVRNSKRGAAGSLINVLNYPGMNHRVEIIEGVLRDECAAMLCDFYRHPRLVKNALKKNAGTSPTQ

SEQ ID NO: 529 - protein, 166 aa, synthetic construct
  REGION 1..166: note = LPG50168 deaminase
MSDTELNHEYWMRHALMLAKRARDEGEVPVGAVLVLKNQVIGEGWNRAIGLHDPTAHAEIMALRQGGLVLQNYRLIDTTLYVTFEPCVMCAGAMVHSRIGNLVFGVRNSKRGAAGSLINVLNYPGMNHRVEIAEGVLADECSAMLCDFYRHPRQQQNALKQAAKHD

SEQ ID NO: 530 - protein, 171 aa, synthetic construct
  REGION 1..171: note = LPG50169 deaminase
MSDIELNHEYWMRHALMLAKRAREEGEVPVGAVLVLNNQVIGEGWNRAIGLHDPTAHAEIMALRQGGLVLQNYRLIDTTLYVTFEPCVMCAGAMVHSRIGHLVFGVRNSKRGAAGSLINVLNYPGMNHRIEFTEGVLADECSGMLCDFYRYPRQQQNTLKQAAKANPPAAQ

SEQ ID NO: 531 - protein, 165 aa, synthetic construct
  REGION 1..165: note = LPG50170 deaminase
MSDNELNHERWMRHALTLAQRARDEGEVPVGAVLVYQNQVIGEGWNRAIGLHDPTAHAEIMALRQGGLVLQNYRLIDTTLYVTFEPCVMCAGAMVHSRIGQLVFGVRNSKRGAAGSLINVLNYPGMNHRVAITEGVLAESCSAMLCDFYRHPREQKNALRRAAQS

SEQ ID NO: 532 - protein, 166 aa, synthetic construct
  REGION 1..166: note = LPG50171 deaminase
MSDLELNDEYWMRHALTLAKRAREEGEVPVGAVLVLNNQVIGEGWNRAIGLHDPTAHAEIMALRQGGLVLQNYRLIDATLYVTFEPCVMCAGAMVHSRIARLVFGVRNSKRGAAGSLMNVLNYPGMNHRVEISEGVLAESCSAMLCDFYRWPREVKNALKKAREQN

SEQ ID NO: 533 - protein, 169 aa, synthetic construct
  REGION 1..169: note = LPG50172 deaminase
MSDLELDHEYWMRHALLLAKRARDEGEVPVGAVLVLNNQVIGEGWNRAIGLHDPTAHAEIMALRQGGLVLQNYRLLDTTLYVTFEPCVMCSGAMVHSRIGTLVYGVRNEKRGAAGSLMNVLGYPGMNHQVQVIDGVLAPECSGLLCDFYRMPRQQKNQQKAESTSSRGD

SEQ ID NO: 534 - protein, 162 aa, synthetic construct
  REGION 1..162: note = LPG50173 deaminase
MSDTELTHEYWMRHALMLAQRARDEGEVPVGAVLVLNNRVIGEGWNRAIGLHDPTAHAEIMALRQGGLVLQNYRLLDTTLYVTFEPCVMCAGAMVHGRIGTLVFGVRNLKRGAAGSLMNVLNYPGMNHRVEIVEGTLSDECSGMLCEFYRQPRLAFNAQKQA

SEQ ID NO: 535 - protein, 173 aa, synthetic construct
  REGION 1..173: note = LPG50174 deaminase
MSIPELNHDVWMRHALTLAKRAREEGEVPVGAVLVLNGQVIGEGWNRAIGLHDPTAHAEIMALRQGGLVLQNYRLIDTTLYVTFEPCVMCAGAMVHSRIGQLVFGVRNSKRGAAGSLMNVLNYPGMNHRVEITEGVLRDECAAMLCDFYRQPRLVKNALKKPAGDPSALQNNR

SEQ ID NO: 536 - protein, 166 aa, synthetic construct
  REGION 1..166: note = LPG50175 deaminase
MSDLELNDEYWMRHALTLAKRAREEGEVPVGAVLVLNNQVIGEGWNRAIGLHDPTAHAEIMALRQGGLVLQNYRLIDATLYVTFEPCVMCAGAMVHSRIARLVFGVRNSKRGAAGSLMNVLNYPGMNHRVEISEGVLAGSCSAMLCDFYRWPREVKNALKKAREQN

SEQ ID NO: 537 - protein, 153 aa, synthetic construct
  REGION 1..153: note = LPG50176 deaminase
MSDIEQNHEYWMRHALVLAKRAREEGEVPVGAVLVLNNQVIGEGWNRAIGLHDPTAHAEIMALRQGGLVLQNYRLIDTTLYVTFEPCVMCAGAMVHGRIGSLVFGVRNSKRGAAGSLINVLNYPGMNHRVEMTEGVLADECSAMLCDFYRHPR

SEQ ID NO: 538 - protein, 168 aa, synthetic construct
  REGION 1..168: note = LPG50177 deaminase
MCNPERDHEYWMRHALTLAQRARDEGEVPVGAVLVLNNQVIGEGWNRAIGLHDPTAHAEIMALRQGGMVLQNYRLLDTTLYVTFEPCVMCSGAMVHSRIGTLVFGVRNEKRGAAGSLLNVLGYPGMNHQVKTIGGVLAPACSALLCDFYRMPRQQKNQQKAELKLSND

SEQ ID NO: 539 - protein, 162 aa, synthetic construct
  REGION 1..162: note = LPG50178 deaminase
MSAIELNHEYWMRHALGLAQRARDEGEVPVGAVLVYQNQVIGEGWNRAIGLHDPTAHAEIMALRQGGLVLQNYRLIDTTLYVTFEPCVMCAGAMVHSRIGRVVFGVRNSKRGAAGSLMNVLNYPGMNHRVEVTEGVLAGECSAMLCDFYRAPRAQFNAQKRP

SEQ ID NO: 540 - protein, 169 aa, synthetic construct
  REGION 1..169: note = LPG50179 deaminase
MSNPELNHEYWMRYALTLAKRAREEGEVPVGAVLVLNERVIGEGWNRAIGLHDPTAHAEIMALRQGGMVLQNYRLIDTTLYVTFEPCVMCAGAMVHSRIGHLVFGVRNSKRGAAGSLMNVLNYPGMNHRVAITEGVLRDECAAMLCDFYRQPRQVKNALKKTLSDSQEQ

SEQ ID NO: 541 - protein, 168 aa, synthetic construct
  REGION 1..168: note = LPG50180 deaminase
MSNPEHDHEYWMRHALNLAQRARDEGEVPVGAVLVLNNQVIGEGWNRAIGLHDPTAHAEIMALRQGGLVLQNYRLLDTTLYVTFEPCVMCSGAMVHSRIGTLVYGVRNEKRGAAGSLMNVLGYPGMNHQVNVIGGVLAQDCSARLCDFYRMPRQQKNQQRAELKAQGD

SEQ ID NO: 542 - protein, 168 aa, synthetic construct
  REGION 1..168: note = LPG50181 deaminase
MSDPELNHEYWMRHALQLAQRARDEGEVPVGAVLVLNNQVIGEGWNRAIGLHDPTAHAEIMALRQGGLVLQNYRLLDTTLYVTFEPCVMCSGAMIHSRIGTVVYGVRNEKRGAAGSLLNVLSYPGMNHQVKVIGEVLAPACSAMLCDFYRMPRQQKNQQKAEWKLSGE

SEQ ID NO: 543 - protein, 171 aa, synthetic construct
  REGION 1..171: note = LPG50182 deaminase
MSNPELNHEYWMRYALTLAKRARDEGEVPVGAVLVYHDQVIGEGWNRAIGLHDPTAHAEIMALRQGGLVLQNYRLIDTTLYVTFEPCVMCAGAMVHSRIGRLVFGVRNSKRGAAGSLLNVLNYPGMNHQIDMEEGVLRDECAAMLCDFYRLPRIVKNALKQSPPDSTNLHA

SEQ ID NO: 544 - protein, 182 aa, synthetic construct
  REGION 1..182: note = APG09980.1 deaminase
MDEQTFLDNFNNLKYPRKTYLCYEVELLVGENHIPLDDYKGFVHNEGFDMGLERCHAELIFLERMASWNLDTELRYRITVFISWSPCPECADELVKFLRENRHVNLRIFAARIYDWYQGYEAGLRALKAAGAEVAMMTLHEFEYCWNNFVDHQQDEDTPFPPWDNLVARSEELSQRLEGILQ

SEQ ID NO: 545 - protein, 185 aa, synthetic construct
  REGION 1..185: note = APG05840.1 deaminase
MDPHMFTGNFTNNPRVFGLHQTYLCYEVKRQGPDGTRDLMNEQRDFLCNQAKNHFSGSEDHHAERCFLDRIPSWQLDPAQTYRVTCFISWSPCFSCAQEVAEFLHENPHVNLRIFAARIYDYLPRYEEGLQMLQNAGAQVSIMTSEEFGHCWDTFVDRQGHPFQPWEGLDEHSQALSGRLQAILQ

SEQ ID NO: 546 - protein, 178 aa, synthetic construct
  REGION 1..178: note = APG00868.1 deaminase
MDPNTFRFHFPNLLYASGRKLCYLCFQVETGDYFSCDDSDRGVFRNKVHPWARCHAEQCFLSWFRDQYPCRDEYYNVTWFLSWSPCPTCAEEVVEFLEEYRNLTLSIFTSRLYYFYHPNYQQGLRKLWDAGVQLDIMSCDDFEHCWDNFVDHKGMRFQRRNLLKDYDFLAAELQEILR

SEQ ID NO: 547 - protein, 152 aa, synthetic construct
  REGION 1..152: note = APG30125 deaminase
MINLVQTPYDLNSGYPIVRRTLEDKKKLVKHEGFGPESCCATIEYTLRGNSRYAFGNSQMQVEMPPNIYAHNWVKLHGEMTALVAAIRRIERVDSTSAVLPITSAYIELRPCEASCLPALHNMLPDNITVYFSFLHPTQVDQWKQSARALCA

SEQ ID NO: 548 - protein, 152 aa, synthetic construct
  REGION 1..152: note = APG30126 deaminase
MPVLIKVPYDINSANGVVQACLRKKREVVQSKDNGGITGIGAGSCCSFVVYMKHGGDVDNVFGNSRIRIPFKVNGIEIANACAHGELTALWNAIADEPSIPTILAMYIEMSPCTKCQSALDNLLQPGQEIYYSFDHPGEVKAWQAAAKHLCA

SEQ ID NO: 549 - protein, 148 aa, synthetic construct
  REGION 1..148: note = APG30127 deaminase
MIKTEYSLSSGYPIVRRTLEDKKNLVKQPGFGPESCCAVVQYRLRGNIRYAFGNSRMQISMPPGIYTHNWVRLHGEMAALVAAINRIERYSTDDVIPITAAYIELRPCEANCMQALRNILPEDACVYYSFDHPTQVDEWKLRANELCS

SEQ ID NO: 550 - protein, 147 aa, synthetic construct
  REGION 1..147: note = APG30128 deaminase
MIKTEYTLRSGYPIVRRTLENKKNLVKQPGFGPESCCAVVEYRLRGNIRYAFGNSRMQVSVPPGIYTNNWVRLHGEMAALVAAIERIERFSSDDVIPITAAYIELRPCEANCMQALHNILPENANVYYSFDHPTQVEEWKLRAHELC

SEQ ID NO: 551 - protein, 147 aa, synthetic construct
  REGION 1..147: note = APG30129 deaminase
MIKTEYALNSGYPIVRRTLEDKKKLVKQPGFGPESCCAVVEYRLRGNIRYAFGNSQMHVSMPPGIYTHNWVKLHGEMAALVAAINRIERFSTDDVIPITGAYIELRPCEANCLQALHNILPEDANVYYSFDHPTQLDEWKLRAHELC

SEQ ID NO: 552 - protein, 147 aa, synthetic construct
  REGION 1..147: note = APG30130 deaminase
MIQLVQAEYSIKSGYPIVRRTLEDKKKLIEKPGFGPESCCATIEYQLRGSTRYAFGNSQMKMEMPPDIYTHNWVKLHAEMAALVAAIRRIERFDADKEQVPITNVYIELRPCEANCMQALQNILPDGTTVYYSFLHPTEVEEWKRSA

SEQ ID NO: 553 - DNA, 300 bp, synthetic construct
  source 1..300: mol_type = other DNA
  misc_feature 1..300: note = NC_041760 promoter
agctccacggcaagagaattcaaagccgcgggcctgggttccacgcggggccccttacccaaggtgccccgggcgctcatttgcatgtcccacccaacaggtaaacctgacaggtcagtcgcggccgggtacggcctggcggtcagagcaccaaacgtacgagccttgtgatgcggttccattgcatgaaattctcctaaaggccccaagatgaacgggaaagcgcgcggttcgctcaccgtaactaaaacaggtgagagactcccgtgccttataaggcctgtggacggaggcagttgc

SEQ ID NO: 554 - DNA, 300 bp, synthetic construct
  source 1..300: mol_type = other DNA
  misc_feature 1..300: note = NW_004848155 promoter
tgttctccgaacagtacttgtaatatacaggttccccgatccaccaccgtctgcgggtggcggtacagcctctcccagtgtgctttgcgctcatttgcatagagcacggcaccgaacgcagccactgtcccccgcgtccgctgtcccccgtgcaggccaaacccgggcgcggccccgccgacggtgggtacagagagtggtcggctcggcaccggctgctgcgcggcaccggcactcaccctgtccttatggagccctaactccatggctataaatatctaaggggaggaagggtagatc

SEQ ID NO: 555 - DNA, 300 bp, synthetic construct
  source 1..300: mol_type = other DNA
  misc_feature 1..300: note = LR738627 promoter
agcgctccgcggagacttctgggacgcggcggctccgactccgccccgcttccggcttatttgcatacagcaattcctagcaggccctgtgctgaatttagtcggaaaactaccatgttcagtcgaaaaagcaaatacttttgtcagatatggccaaaaacttcacttgacttagccgtgtttcatgtaaagcattaaaaggatggagtgattgttcaaatttcataagaagaattcaccttcagtttaaggtggttcgctttctgcacttcaaataccgcggtggacagaccctgtttc

SEQ ID NO: 556 - DNA, 300 bp, synthetic construct
  source 1..300: mol_type = other DNA
  misc_feature 1..300: note = NC_044556 promoter
gcctgagtcgcgccgccgcctcccaaagacttctgggaaggcggtgcggctcaggctccgccccgcttccggggatatttgcatacgagcattcccagtaattcccagcagccactgtagctatatttggtagaataacgagcactttctgaactccagttaataactgcgttagttgcgttacacattggactaaaacaaatagaagttgaatctctagagcagtggagataagtcgccgtatgtgtacagaaattgcttccgggggctataaatagctggtagtggggctagaacgtc

SEQ ID NO: 557 - DNA, 300 bp, synthetic construct
  source 1..300: mol_type = other DNA
  misc_feature 1..300: note = XM_030845548 promoter
cgcccgcgcagcgcagccgcttcccagagacttctgggacggcagcggctgcggctccgcccctcttccagtataatttgcatgcgaccatggattcccagcagccacctgagtcatatttggtggaacaaaaaccactttctcaatttcagtgaatgaccccatttggttaaggtattgttgcacaaatatcataaaagaagggacgaatggctgaaccggtttttaatggagttcgcccttagcgtaaaagagtttattctatgccctctaaatagttctgggatcaaccgtactact

SEQ ID NO: 558 - DNA, 111 bp, synthetic construct
  source 1..111: mol_type = other DNA
  misc_feature 1..111: note = Mini NC_041760 promoter
ccccttacccaaggtgccccgggcgctcatttgcatgtcccaccgctcaccgtaactaaaacaggtgagagactcccgtgccttataaggcctgtggacggaggcagttgc

SEQ ID NO: 559 - DNA, 111 bp, synthetic construct
  source 1..111: mol_type = other DNA
  misc_feature 1..111: note = Mini NW_004848155 promoter
acagcctctcccagtgtgctttgcgctcatttgcatagagcacgactcaccctgtccttatggagccctaactccatggctataaatatctaaggggaggaagggtagatc

SEQ ID NO: 560 - DNA, 111 bp, synthetic construct
  source 1..111: mol_type = other DNA
  misc_feature 1..111: note = Mini LR738627 promoter
ggctccgactccgccccgcttccggcttatttgcatacagcaatattcaccttcagtttaaggtggttcgctttctgcacttcaaataccgcggtggacagaccctgtttc

SEQ ID NO: 561 - DNA, 111 bp, synthetic construct
  source 1..111: mol_type = other DNA
  misc_feature 1..111: note = Mini NC_044556 promoter
gctcaggctccgccccgcttccggggatatttgcatacgagcatagtcgccgtatgtgtacagaaattgcttccgggggctataaatagctggtagtggggctagaacgtc

SEQ ID NO: 562 - DNA, 111 bp, synthetic construct
  source 1..111: mol_type = other DNA
  misc_feature 1..111: note = Mini XM_030845548 promoter
gctgcggctccgcccctcttccagtataatttgcatgcgaccatgttcgcccttagcgtaaaagagtttattctatgccctctaaatagttctgggatcaaccgtactact

SEQ ID NO: 563 - protein, 1493 aa, synthetic construct
  REGION 1..1493: note = CSB
MPNEGIPHSSQTQEQDCLQSQPVSNNEEMAIKQESGGDGEVEEYLSFRSVGDGLSTSAVGCASAAPRRGPALLHIDRHQIQAVEPSAQALELQGLGVDVYDQDVLEQGVLQQVDNAIHEASRASQLVDVEKEYRSVLDDLTSCTTSLRQINKIIEQLSPQAATSRDINRKLDSVKRQKYNKEQQLKKITAKQKHLQAILGGAEVKIELDHASLEEDAEPGPSSLGSMLMPVQETAWEELIRTGQMTPFGTQIPQKQEKKPRKIMLNEASGFEKYLADQAKLSFERKKQGCNKRAARKAPAPVTPPAPVQNKNKPNKKARVLSKKEERLKKHIKKLQKRALQFQGKVGLPKARRPWESDMRPEAEGDSEGEESEYFPTEEEEEEEDDEVEGAEADLSGDGTDYELKPLPKGGKRQKKVPVQEIDDDFFPSSGEEAEAASVGEGGGGGRKVGRYRDDGDEDYYKQRLRRWNKLRLQDKEKRLKLEDDSEESDAEFDEGFKVPGFLFKKLFKYQQTGVRWLWELHCQQAGGILGDEMGLGKTIQIIAFLAGLSYSKIRTRGSNYRFEGLGPTVIVCPTTVMHQWVKEFHTWWPPFRVAILHETGSYTHKKEKLIRDVAHCHGILITSYSYIRLMQDDISRYDWHYVILDEGHKIRNPNAAVTLACKQFRTPHRIILSGSPMQNNLRELWSLFDFIFPGKLGTLPVFMEQFSVPITMGGYSNASPVQVKTAYKCACVLRDTINPYLLRRMKSDVKMSLSLPDKNEQVLFCRLTDEQHKVYQNFVDSKEVYRILNGEMQIFSGLIALRKICNHPDLFSGGPKNLKGLPDDELEEDQFGYWKRSGKMIVVESLLKIWHKQGQRVLLFSQSRQMLDILEVFLRAQKYTYLKMDGTTTIASRQPLITRYNEDTSIFVFLLTTRVGGLGVNLTGANRVVIYDPDWNPSTDTQARERAWRIGQKKQVTVYRLLTAGTIEEKIYHRQIFKQFLTNRVLKDPKQRRFFKSNDLYELFTLTSPDASQSTETSAIFAGTGSDVQTPKCHLKRRIQPAFGADHDVPKRKKFPASNISVNDATSSEEKSEAKGAEVNAVTSNRSDPLKDDPHMSSNVTSNDRLGEETNAVSGPEELSVISGNGECSNSSGTGKTSMPSGDESIDEKLGLSYKRERPSQAQTEAFWENKQMENNFYKHKSKTKHHSVAEEETLEKHLRPKQKPKNSKHCRDAKFEGTRIPHLVKKRRYQKQDSENKSEAKEQSNDDYVLEKLFKKSVGVHSVMKHDAIMDGASPDYVLVEAEANRVAQDALKALRLSRQRCLGAVSGVPTWTGHRGISGAPAGKKSRFGKKRNSNFSVQHPSSTSPTEKCQDGIMKKEGKDNVPEHFSGRAEDADSSSGPLASSSLLAKMRARNHLILPERLESESGHLQEASALLPTTEHDDLLVEMRNFIAFQAHTDGQASTREILQEFESKLSASQSCVFRELLRNLCTFHRTSGGEGIWKLKPEYC

SEQ ID NO: 564 - protein, 116 aa, synthetic construct
  REGION 1..116: note = USP2
MKTTTQELKQYITRLFQLSNNETWECEALEEAAENILPERFINNSLLAHLTLNTYTYYNDELHELSIYPFLMYANDQLISIGYLDHFDMDFLYLTDTKNTIIDERHLLKQGENNHE

SEQ ID NO: 565 - protein, 82 aa, synthetic construct
  REGION 1..82: note = glycosylase inhibitor (UGI) domain
TNLSDHEKETGKQLVIQESILMLPEEVEEVIGNKPESDILVHTAYDESTDENVMLLTSDAPEYKPWALVIQDSNGENKIKML

SEQ ID NO: 566-572 - skipped (7 entries)

SEQ ID NO: 573 - DNA, 25 bp, Homo sapiens
  source 1..25: mol_type = other DNA
  misc_feature 1..25: note = Stargardt disease target
gcctttcacacgtggtctgcagagt

SEQ ID NO: 574 - DNA, 25 bp, Homo sapiens
  source 1..25: mol_type = other DNA
  misc_feature 1..25: note = Stargardt disease target
tccagggcgaactctgacacacagc

SEQ ID NO: 575 - DNA, 25 bp, Homo sapiens
  source 1..25: mol_type = other DNA
  misc_feature 1..25: note = Stargardt disease target
tgtgtgtcagagttcgccctggaga

SEQ ID NO: 576 - DNA, 25 bp, Homo sapiens
  source 1..25: mol_type = other DNA
  misc_feature 1..25: note = Stargardt disease target
gggtactctgcagaccacgtgtgaa

SEQ ID NO: 577 - DNA, 25 bp, Homo sapiens
  source 1..25: mol_type = other DNA
  misc_feature 1..25: note = Stargardt disease target
agggcgaactctgacacacagcctg

SEQ ID NO: 578 - DNA, 25 bp, Homo sapiens
  source 1..25: mol_type = other DNA
  misc_feature 1..25: note = Stargardt disease target
ctgtgtgtcagagttcgccctggag

SEQ ID NO: 579 - DNA, 25 bp, Homo sapiens
  source 1..25: mol_type = other DNA
  misc_feature 1..25: note = Stargardt disease target
gaggtgggtactctgcagaccacgt

SEQ ID NO: 580 - DNA, 25 bp, Homo sapiens
  source 1..25: mol_type = other DNA
  misc_feature 1..25: note = Stargardt disease target
ggctgtgtgtcagagttcgccctgg

SEQ ID NO: 581 - DNA, 25 bp, Homo sapiens
  source 1..25: mol_type = other DNA
  misc_feature 1..25: note = Stargardt disease target
ctgtgtgtcagagttcgccctggag

SEQ ID NO: 582 - DNA, 25 bp, Homo sapiens
  source 1..25: mol_type = other DNA
  misc_feature 1..25: note = Stargardt disease target
ggctgtgtgtcagagttcgccctgg

SEQ ID NO: 583 - DNA, 25 bp, Homo sapiens
  source 1..25: mol_type = other DNA
  misc_feature 1..25: note = Phenylketonuria target
tattgtggcaacaaagttcctaaga

SEQ ID NO: 584 - DNA, 25 bp, Homo sapiens
  source 1..25: mol_type = other DNA
  misc_feature 1..25: note = Phenylketonuria target
ctgagaagggccaaggtattgtggc

SEQ ID NO: 585 - DNA, 25 bp, Homo sapiens
  source 1..25: mol_type = other DNA
  misc_feature 1..25: note = Phenylketonuria target
gcccttctcagttcgctacgaccca

SEQ ID NO: 586 - DNA, 25 bp, Homo sapiens
  source 1..25: mol_type = other DNA
  misc_feature 1..25: note = Phenylketonuria target
gaactgagaagggccaaggtattgt

SEQ ID NO: 587 - DNA, 25 bp, Homo sapiens
  source 1..25: mol_type = other DNA
  misc_feature 1..25: note = Phenylketonuria target
gacctcaatcctttgggtgtatggg

SEQ ID NO: 588 - DNA, 25 bp, Homo sapiens
  source 1..25: mol_type = other DNA
  misc_feature 1..25: note = Phenylketonuria target
taccttggcccttctcagttcgcta

SEQ ID NO: 589 - DNA, 25 bp, Homo sapiens
  source 1..25: mol_type = other DNA
  misc_feature 1..25: note = Phenylketonuria target
gagaagggccaaggtattgtggcag

SEQ ID NO: 590 - DNA, 25 bp, Homo sapiens
  source 1..25: mol_type = other DNA
  misc_feature 1..25: note = Phenylketonuria target
tgagaagggccaaggtattgtggca

SEQ ID NO: 591 - DNA, 25 bp, Homo sapiens
  source 1..25: mol_type = other DNA
  misc_feature 1..25: note = Phenylketonuria target
cccttctcagttcgctacgacccat

SEQ ID NO: 592 - DNA, 25 bp, Homo sapiens
  source 1..25: mol_type = other DNA
  misc_feature 1..25: note = Phenylketonuria target
gttcgctacgacccatacacccaaa

SEQ ID NO: 593 - DNA, 25 bp, Homo sapiens
  source 1..25: mol_type = other DNA
  misc_feature 1..25: note = Hyperphenylalaninemia, non-pku target
tgggtgtatgggtcgcagcgaactg

SEQ ID NO: 594 - DNA, 25 bp, Homo sapiens
  source 1..25: mol_type = other DNA
  misc_feature 1..25: note = Alpha-1-antitrypsin deficiency target
cttcagtccctttcttgtcgatggt

SEQ ID NO: 595 - DNA, 25 bp, Homo sapiens
  source 1..25: mol_type = other DNA
  misc_feature 1..25: note = Alpha-1-antitrypsin deficiency target
gtcgatggtcagcacagccttatgc

SEQ ID NO: 596 - DNA, 25 bp, Homo sapiens
  source 1..25: mol_type = other DNA
  misc_feature 1..25: note = Alpha-1-antitrypsin deficiency target
tcgacaagaaagggactgaagctgc

SEQ ID NO: 597 - DNA, 25 bp, Homo sapiens
  source 1..25: mol_type = other DNA
  misc_feature 1..25: note = Alpha-1-antitrypsin deficiency target
gacaagaaagggactgaagctgctg

SEQ ID NO: 598 - DNA, 25 bp, Homo sapiens
  source 1..25: mol_type = other DNA
  misc_feature 1..25: note = Alpha-1-antitrypsin deficiency target
gaccatcgacaagaaagggactgaa

SEQ ID NO: 599 - DNA, 25 bp, Homo sapiens
  source 1..25: mol_type = other DNA
  misc_feature 1..25: note = Alpha-1-antitrypsin deficiency target
tcgacaagaaagggactgaagctgc

SEQ ID NO: 600 - DNA, 25 bp, Homo sapiens
  source 1..25: mol_type = other DNA
  misc_feature 1..25: note = Alpha-1-antitrypsin deficiency target
gaaagggactgaagctgctggggcc

SEQ ID NO: 601 - DNA, 25 bp, Homo sapiens
  source 1..25: mol_type = other DNA
  misc_feature 1..25: note = Alpha-1-antitrypsin deficiency target
gacaagaaagggactgaagctgctg

SEQ ID NO: 602 - DNA, 25 bp, Homo sapiens
  source 1..25: mol_type = other DNA
  misc_feature 1..25: note = Alpha-1-antitrypsin deficiency target
ccatcgacaagaaagggactgaagc

SEQ ID NO: 603 - DNA, 25 bp, Homo sapiens
  source 1..25: mol_type = other DNA
  misc_feature 1..25: note = Carbohydrate-deficient glycoprotein syndrome type I target
cttggctgcagcttcttccaatagg

SEQ ID NO: 604 - DNA, 25 bp, Homo sapiens
  source 1..25: mol_type = other DNA
  misc_feature 1..25: note = Carbohydrate-deficient glycoprotein syndrome type I target
agccaagaagaacacattgagttct

SEQ ID NO: 605 - DNA, 25 bp, Homo sapiens
  source 1..25: mol_type = other DNA
  misc_feature 1..25: note = Carbohydrate-deficient glycoprotein syndrome type I target
cttcttggctgcagcttcttccaat

SEQ ID NO: 606 - DNA, 25 bp, Homo sapiens
  source 1..25: mol_type = other DNA
  misc_feature 1..25: note = Carbohydrate-deficient glycoprotein syndrome type I target
ggatgttaaacgtgtcccctattgg

SEQ ID NO: 607 - DNA, 25 bp, Homo sapiens
  source 1..25: mol_type = other DNA
  misc_feature 1..25: note = Carbohydrate-deficient glycoprotein syndrome type I target
ggggacacgtttaacatcccatttc

SEQ ID NO: 608 - DNA, 25 bp, Homo sapiens
  source 1..25: mol_type = other DNA
  misc_feature 1..25: note = Carbohydrate-deficient glycoprotein syndrome type I target
gaacacattgagttctacgaactcg

SEQ ID NO: 609 - DNA, 25 bp, Homo sapiens
  source 1..25: mol_type = other DNA
  misc_feature 1..25: note = Carbohydrate-deficient glycoprotein syndrome type I target
ggggacacgtttaacatcccatttc

SEQ ID NO: 610 - DNA, 25 bp, Homo sapiens
  source 1..25: mol_type = other DNA
  misc_feature 1..25: note = Familial Mediterranean fever target
actacagagctggaagcatctcctt

SEQ ID NO: 611 - DNA, 25 bp, Homo sapiens
  source 1..25: mol_type = other DNA
  misc_feature 1..25: note = Carnitine palmitoyltransferase II deficiency target
ctcccagagccctccataatgaaaa

SEQ ID NO: 612 - DNA, 25 bp, Homo sapiens
  source 1..25: mol_type = other DNA
  misc_feature 1..25: note = Carnitine palmitoyltransferase II deficiency target
gctgggctgtgggtatgatttctcc

SEQ ID NO: 613 - DNA, 25 bp, Homo sapiens
  source 1..25: mol_type = other DNA
  misc_feature 1..25: note = Carnitine palmitoyltransferase II deficiency target
gggagaaatcatacccacagcccag

SEQ ID NO: 614 - DNA, 25 bp, Homo sapiens
  source 1..25: mol_type = other DNA
  misc_feature 1..25: note = Carnitine palmitoyltransferase II deficiency target
caagctacattttgggtaggtaggc

SEQ ID NO: 615 - DNA, 25 bp, Homo sapiens
  source 1..25: mol_type = other DNA
  misc_feature 1..25: note = Carnitine palmitoyltransferase II deficiency target
ctacattttgggtaggtaggctggg

SEQ ID NO: 616 - DNA, 25 bp, Homo sapiens
  source 1..25: mol_type = other DNA
  misc_feature 1..25: note = Carnitine palmitoyltransferase II deficiency target
agctacattttgggtaggtaggctg

SEQ ID NO: 617 - DNA, 25 bp, Homo sapiens
  source 1..25: mol_type = other DNA
  misc_feature 1..25: note = Deafness target
ctcccagtggccatgcacgtggcct

SEQ ID NO: 618 - DNA, 25 bp, Homo sapiens
  source 1..25: mol_type = other DNA
  misc_feature 1..25: note = Deafness target
atgagaagaagaggaagttcatcaa

SEQ ID NO: 619 - DNA, 25 bp, Homo sapiens
  source 1..25: mol_type = other DNA
  misc_feature 1..25: note = Deafness target
gcatggccactgggagcgctggcgt

SEQ ID NO: 620 - DNA, 25 bp, Homo sapiens
  source 1..25: mol_type = other DNA
  misc_feature 1..25: note = Deafness target
gcgctcccagtggccatgcacgtgg

SEQ ID NO: 621 - DNA, 25 bp, Homo sapiens
  source 1..25: mol_type = other DNA
  misc_feature 1..25: note = Deafness target
ggccactgggagcgctggcgtggac

SEQ ID NO: 622 - DNA, 25 bp, Homo sapiens
  source 1..25: mol_type = other DNA
  misc_feature 1..25: note = Deafness target
gatcactacttccccatctcccaca

SEQ ID NO: 623 - DNA, 25 bp, Homo sapiens
  source 1..25: mol_type = other DNA
  misc_feature 1..25: note = Deafness target
gtgagctagatctttccaatgctgg

SEQ ID NO: 624 - DNA, 25 bp, Homo sapiens
  source 1..25: mol_type = other DNA
  misc_feature 1..25: note = Deafness target
gacgatcctggggggtgtgaacaaa

SEQ ID NO: 625 - DNA, 25 bp, Homo sapiens
  source 1..25: mol_type = other DNA
  misc_feature 1..25: note = Deafness target
gattggggcacgctgcagacgatcc

SEQ ID NO: 626 - DNA, 25 bp, Homo sapiens
  source 1..25: mol_type = other DNA
  misc_feature 1..25: note = Deafness target
gtgagctagatctttccaatgctgg

SEQ ID NO: 627 - DNA, 25 bp, Homo sapiens
  source 1..25: mol_type = other DNA
  misc_feature 1..25: note = Deafness target
gctagatctttccaatgctggtgga

SEQ ID NO: 628 - DNA, 25 bp, Homo sapiens
  source 1..25: mol_type = other DNA
  misc_feature 1..25: note = Deafness target
gtgagctagatctttccaatgctgg

SEQ ID NO: 629 - DNA, 25 bp, Homo sapiens
  source 1..25: mol_type = other DNA
  misc_feature 1..25: note = Deafness target
gtgagctagatctttccaatgctgg

SEQ ID NO: 630 - DNA, 25 bp, Homo sapiens
  source 1..25: mol_type = other DNA
  misc_feature 1..25: note = Familial hypercholesterolemia target
gaagatggcttggatgagtggccgc

SEQ ID NO: 631 - DNA, 25 bp, Homo sapiens
  source 1..25: mol_type = other DNA
  misc_feature 1..25: note = Familial hypercholesterolemia target
gccactcatccaagccatcttcgca

SEQ ID NO: 632 - DNA, 25 bp, Homo sapiens
  source 1..25: mol_type = other DNA
  misc_feature 1..25: note = Familial hypercholesterolemia target
gagggcaaccggaagaccatcttgg

SEQ ID NO: 633 - DNA, 25 bp, Homo sapiens
  source 1..25: mol_type = other DNA
  misc_feature 1..25: note = Familial hypercholesterolemia target
aacgagggcaaccggaagaccatct

SEQ ID NO: 634 - DNA, 25 bp, Homo sapiens
  source 1..25: mol_type = other DNA
  misc_feature 1..25: note = Familial hypercholesterolemia target
gagggcaaccggaagaccatcttgg

SEQ ID NO: 635 - DNA, 25 bp, Homo sapiens
  source 1..25: mol_type = other DNA
  misc_feature 1..25: note = Familial hypercholesterolemia target
ggctggcccaccccttctccttggc

SEQ ID NO: 636 - DNA, 25 bp, Homo sapiens
  source 1..25: mol_type = other DNA
  misc_feature 1..25: note = Familial hypercholesterolemia target
gcaaccggaagaccatcttggagga

SEQ ID NO: 637 - DNA, 25 bp, Homo sapiens
  source 1..25: mol_type = other DNA
  misc_feature 1..25: note = Noonan syndrome target
gagtcaccatgagtagtagtttagg

SEQ ID NO: 638 - DNA, 25 bp, Homo sapiens
  source 1..25: mol_type = other DNA
  misc_feature 1..25: note = Noonan syndrome target
gtcaccatgagtagtagtttaggaa

SEQ ID NO: 639 - DNA, 25 bp, Homo sapiens
  source 1..25: mol_type = other DNA
  misc_feature 1..25: note = Noonan syndrome target
gagtcaccatgagtagtagtttagg

SEQ ID NO: 640 - DNA, 25 bp, Homo sapiens
  source 1..25: mol_type = other DNA
  misc_feature 1..25: note = Noonan syndrome target
tcaccatgagtagtagtttaggaaa

SEQ ID NO: 641 - DNA, 25 bp, Homo sapiens
  source 1..25: mol_type = other DNA
  misc_feature 1..25: note = Noonan syndrome target
ctactactcatggtgactcaagcct

SEQ ID NO: 642-643 - skipped (2 entries)

SEQ ID NO: 644 - protein, 168 aa, synthetic construct; identical to SEQ ID NO: 509
  REGION 1..168: note = LPG50148 deaminase

SEQ ID NO: 645 - protein, 1077 aa, synthetic construct
  REGION 1..1077: note = LPG10165 nickase
MKYSIGLAIGIASVGWAVINEDIERIEDMGIRIFDAAENPKDGSSLSTPRREARSTRKRLRRRRHRVERIRQFIIQKGLLTQVQMEQLYDWKAEDLDIWLIRVNGLERKLTDREFARVLIHLVKNRGFKSNRKSELKEGDNGVVLSAVQENKQLMEEKGYQTIAEMLLFDERFEGCKRNKGGAYSHVVARSDLEHEIRLIFQKQREYGHAFSTTENEEAYINIWSSQRPFATKDDIAKKIGYCTLEPKEKRTPKSTYTFERFRAIDKLNRLRILSAITPSRELTQEERDDVLNSLFSKKEVKYKELRKLLRLKDEQRFNEIYYAPNESNEKNENRTFLSLESQHKIRAIIKQVEGKNVNDSYRPIDLDTFAYALTVFKDDQDIRDYLQNRYVSSNGKKVLNLANLEYKEKLIEELLQLSFTKFGHLSLKALKNILPYMEQGMPYHQACAEAGYTFNQRVNKEKQYLLPVIPTKDIANPVVIRSMSQVRKVVNGIIKKYGSPSAIYIELAREMGRVYKERKELEKQYNKNREINEGAKKHIVELHPQLGDPRGHDILKYKLWKEQDGRCAYSFQPISIERLFHIGYAEVDHIIPYSRSFDDSNSNKVLVIAAENQNKQNRTPYEWFGHNEIKWQKFTSFVTTMKVSKKKKGLLLKKDFDEDQAEEFRSRHLNDTRYITRFIKTFIEDNLLFRTEENRKQYAHTVNGAYTSLMRKRWGFNKNRQENDLHHALDAVIIAVSLPFKHRVSAYFKRREEYAHNQLKREGEFFPEPWPEFIHELEIRMMQEPEKMKLAMESLDLKTYDESFINELNPVFVSRMPKRSIKGQIHEETLKRVRGYTEDGYIRTVKKVRLDQIPFDKNGDFSMFGKETDMKTYEAIKNRYLEFGKDKKKAFNSPLYKPAKNPENAPIIRSVKIEDKANRVVMLDEKTAADNASIVRTEVFRHKGTGNYFLTPVYVADVLSKRIPDRVITTKKPYSEWKRITDDFEFLFSLYPNDLIRVKMPKEKETKTNMKEKYVWQENFMYFKGVHSGSAGVRMIDHMNSFEDEIGVQKLIIFEKYQVDPLGRITKVHGEKRHGI

SEQ ID NO: 646 - protein, 1071 aa, synthetic construct
  REGION 1..1071: note = LPG10167 nickase
MSELDYRIGLAIGTNSIGWGVIELFWKKDRERYEKVKIVDKGVRMFDKAEIPKTGASLAEPRRIARSSRRRLNRKSQRKKDIRNLLVQHGVITQKELDSLYPLSKKAMDIWDIRLDGLDRLLNHFEWTRLLIHLAQRRGFKSNRKSELKDAETGKVLSSIQVNEKRLSLYRTVGEMWIKDADFIKYDRRRNSPNEYVFSVSRANLEKEIVTLFETQRKFQSPYASKNLQEAYLQIWAHQLPFASGNAILNKVGYCSLLKGKERRIPKATYTFQYFSALDQVNRTRLGPDFQPFTQEQREIILDKMFQRTDYYKKKTVPEVTYYDIRKWLELDETIQFKGLNYDPNEELKKIEKKPFINLKAFYEIKKVVANYAERTNEAFSTLDYDAIAYALTVYKTDKDIRSYLKSSHNLSKRCYDDQLIEELLSLSYTKFGHLSLKAINYVLPIMQEGRTYKEAADQLGYDTTGLKKEKRNKFLPLIPDEITNPIVKRALTQARKVVNAIIRRYGSPHSVHIELARELSKNHDERKKIVSAQDENYKNNKGAISVLSEYGILDPTGYDIVRYKLWKEQGERCAYSLKEIPPDTFFNELKKERNGSPILEVDHVLPYSQSFIDSYHNKVLVYSDENRKKGNRIPYTYFLETNKDWEYFETYVRSNKLFSKKKREYLLKKAYLPRESELIKERHLNDTRYASAFLKNFIEQNLQFKEVEDNLRKRRVQTVNGVITAHFRKRWGLEKDRQETYLHHAMDAIVVACTDHHMVTRVTEYYQIRESNKSVKKPYFPMPWEGFRDELLSHLASQPIAKKISEELKAGYQSFDYIFVSRMPKRSVTGAAHDQTIMRKGGIDKKGKTIIIKRLQLKDIKFDENGDFKMVGKEQDMATYEAIKRRYLEHGKKSEKAFETPLYKPSKSGRGNLIKRVKIEVQTKSFVREVNGGVAQNGNLVRVDLFEKDAKYYMVPIYVPDTVFSELPNKAVTSSKGYKQWLTLDNSFMFKFSLYPYDLVRLVKGNEDRFLYFGTLDIDSDRLIFKDVNKPSKQTEYRYSLKTIEDLEKYEVGVLGDLRLVRKETRRNFQ

SEQ ID NO: 647 - protein, 1072 aa, synthetic construct
  REGION 1..1072: note = LPG10168 nickase
MSELDYRIGLAIGTNSIGWGAIELSWNKDRERYEKVRIVDKGVRMFDKAEIPKTGASLAEPRRIARSSRRRLNRKSQRKKDIRNLLVQHGVIIQKELDSLYPLSKKSMDIWDIRLDGLDRLLNHCEWARLLIHLAQRRGFKSNRKSELKDTETGKVLSSIQVNEKRLSLYRTVGEMWMKDPDFNKYDRKRNSPNEYVFSVSRADLEKEIVTLFEAQRKFQSSYASKDLQETYLQIWAHQLPFASGNAILNKVGYCSLLKGKERRIPKATYTFQYFSALDQVNRTRLGPDFQPFTKEQREIILDKMFQRTNYYEKKTIPEVTYYDIRKWLELDETIQFKGLNYDPNEELKKIEKKPFINLKAFYEIKKVVANYAERTNEEFSTLDYDAIAYALTVYKTDKDIRSYLKSSHNLSKRCYDDQLIEELLSLSYTKFGHLSLKATNYVLPIMQEGRTYKEAADQLGYDTTGLKKEKRNKFLPLIPDEITNPIVKRALTQARKVVNAIIRRYGSPHSVHIELARELSKNHDERKKIVSAQDENYKKNKGAISVLSEYGILDPTGYDIVRYKLWKEQGERCAYSLKEIPPDTFFNELKKERNGSPILEVDHVLPYSQSFIDSYHNKVLVYSDENRKKGNRIPYTYFLETNKDWEYFETYVRSNKLFSKKKREYLLKKAYLPRESELIKERHLNDTRYASAFLKNFIEQNLQFKEVEDNLRKRRVQTVNGVITAHFRKRWGLEKDRQETYLHHAMDAIVVACTDHHMVTRVTEHYQIRESNKSVKKPYFPMPWEGFRDELLSHLASQPIAKKISEELKAGYQSFDYIFVSRMPKRSVTGAAHDQTIMRKGGIDKKGKTIIIKRLQLKDIKFDENGDFKMVGKEQDMATYEAIKRRYLEHGKKSEKAFETPLYKPSKSGRGNLIKRVKIEVQTKSFVREVNGGVAQNGNLVRVDLFEKDAKYYMVPIYVPDTVFSELPNKAVTSSKGYKQWLTLDNSFTFKFSLYPYDLVRLVKGDEDRFLYFSTLDIDSDRLIFKDVNRPSKQTEYRYSLKTIEDLEKYEVGILGDLRLVRKETRRNFNR

SEQ ID NO: 648 - protein, 1084 aa, synthetic construct
  REGION 1..1084: note = LPG10171 nickase
MVKLQYVLGLAIGIASCGWAVINTEKERIEDLGVRIFDKAENPKDGKSLATPRRDARSTRRTLRRKKHRMQRIKILLVKHGLLSKTELDHLYESATENDVWDLRLNALERRLNPKEFARVLIHLAKRRGFKSNRKETTLSESGQILENISENQQIMEQQNYRTVGEMILKDKKFENHKRNKDGTYIGTVTRQQLQDEIHMIFNAQRLFKNNFATEEFESHYLEIWSSQRPYASKDQIEKMIGYCTLEPKEKRAPKASWSFQYFVALQTINNLRLISKDRIEELSFEEKKQIMNLALEKPIVKYIDIRKLLSISNDLHFNNLLYSTDTVDTTVENRKCIELKEYHSINKVYKQIYGKGVPNLLPIDYDTIAYALTIFKDDKDILEYLQNKYVNAKGKPINNSAKKTYDDIFIQALLTLNFTKMGHLSFKSLKNIIPFLEDGLSYDKACEKAGYNFKGTSYTEKTKYLPVIPQNTNPVVHRALSQTRKVINAIIKKYGSPKAIHIETARELSKTFQERKEIDSMYQDNSKKNEHAIRKLKELGNINPSGINIVKFKLWNEQDGRCMYSGKYIEPHRLFEEGYTEVDHVLPYSRSLDDSYNNKALTLGTENQGKGNKTPYEFMGNTSIWNEFETRVQSNKKINKRKQQKLLLQNFSHAREQEFIERNLNDTRYATIYLSSLIQQHLIFSESSREKKVHTVSGIITSHLRSRWGFNKDRKEGHIHHALDAVIVAVTSDHMIQRVTKYYKLKELNRNLQAKRIPFPEPWEGFRLELEARISPNTQQYLKGIRFKNYADINLTEIKPIFVSRMPKRSITGELHQETIRKFIGYNEKGKVLTTIKTKLEDIPFDANGDFPMYGKETDLYTYNAIKERYLSHKKDKRKSFQEPLYKPTKTGEIGPLIKSIKIIDTRTIVNPVNQGKGVVYNSKIARTDVFKKNDKYYLIPIYTIDLMKNILPQKAITAGKGYEDWTTIDHSFTFLFSLFPNDLIQIVPTKNRTIKAKTTVSKKEVLLPSLTGYFKGVHSGTAGITVETHDGSVIANIGSKQLLIFEKYQVDILGHYTKIKEEKRIGMATYNDNKKSTAFSSL

SEQ ID NO: 649 - protein, 1488 aa, synthetic construct
  REGION 1..1488: note = LPG10186 nickase
MAKQKYTVGLAIGTNSVGWAVINQDFKLVSGKKHINDNGKQKRSRTNLWGVRLFDAAETAEDRRLKRGMRRRIARRKERLNYLRGIFQADILAFDDSFFIRMDESFLQDDDKQATAFSYRDQSGAMQTRVVTEKEAVKYPLFNGKSGSGETYTDESAYYNQYPTIYHLRQRLIDNPAQADLRLVYLAMHHILKYRGHFVNQGQTFDLGNINIAGNLTSALDKLDEASSFKFGLADVDADQANAILKNKQWSASKKAYELNALFEIIQDTVYRRENETQAVTYDSLTVKQQEKWLAEKQKQVKAFLTGIVGNTISPKDIFANKDYDKKQNEDFPEKIKYSNENFEEQIGALEKYLDETEVAAIVAGKDVYESLVLSNILTKSTLSGSMIEKYNVHGAQLKSLKSFSRKVSAEFYDKLFNVVKDEKGKPHIGVYAQYVDGVGNPAKRLAREDFYDALKKVFESEFKGLTFPVGEKGIDFTKTDLSADRVAFIREMNEAINLENYLPKQRQADNGEIPYQVHEHELIRIIENQKQYYPFLGDKVQVAYEDESGQTQVRSEYKIQVLFKFRIPYYVGTLAKNSGWVNEDGKKLVARNVAAKNSWVVRNSDERVTPWNFEQVINKEASSINFIERMTNFDTYLPNEKVLPKNSLLYQEFIVNNELISSGYYLNGRKEYFLPEQRQRIITRLFKRYRKVSAKQMLDFLKNEYQIKLDDDPKKLFGLDTFVKVPSYNGSLSTVVDLTKKMGISEDLIANYPERFEEIIKWQTIFEDKKILKKTIREVNHNKWSGMLTAEQVNKLSKRHYTGWGRLSQKLLDGVKTSQGRTIIESLREGICDNFMRLIEDEKIAEFIANAQVAGAKDGVLAYDLVDQLPGSPAIKKGIWQSLRVLQELEHYLGRDAIGKVVIEMSRDDESSRRTKARKQQLEEFYKKFKESTGSDVTAELKRELSEKDAKEIDDEKVFLYFLQNGKSMYSGDQLYLSRLADYQVDHIVPQTYIKDDSLDNKVLVTQRDNQNKGGDTPSQTVVTRMNSYWEMLAKNGQVSPRKLANLKKGPITLKQREGFINRQLVENRQITKHVANILMNYYTGTDTLVLTPKSGLTSQLRSGLIYELNPAFDEAKALDRGKAYQVERYTTVKLHDRFVKNRKLNDYHHAHDAYLNAFVAQYVYQEHPEWKNAWVYGKYPRNGQADFGKWATQRKQKSLQLLSSMANDVWNLEDPDTMEKTILNRDETFEQMRQTLCYRNINIVKKLETQTGKFGDESVYKKGNKADHYSLGLKRKYPPQKYGGTKGAISAVTALVKDNSGRVIPVSISASDYDSYQNASDKLAWLLMRKKNIAEILVASLPKYTKYELPSGALRLLASYQEAQSAVELPMLNLGLMDDEAKVLNLYDQLAQFIADNKLFTDKKIALLKGEMRAAFDRLEEFKDKQKVIDELLGVTNGSNQGLQALNSIGLGTSNQRLKSGNTMTNGVTLINESVTGLYLTRTTYN

SEQ ID NO: 650 - protein, 1077 aa, synthetic construct
  REGION 1..1077: note = LPG10190 nickase
MKYSIGLAIGIASVGWAVINEDIERIEDFGVRIFDAAENPKDGASLSTPRREARSTRKRLRRRRHRVERIRQLIIQKGLLTQVQMEQLYDWKAEDLDIWLIRVNGLERKLTDREFARVLIHLAKNRGFKSNRKSELKEGDNGVVLSAVQENKQLMEEKGYQTIAEMLLFDERFDGCKRNKGGAYSHVVARSDLEHEIRLIFQKQREYGHAFATIENEEGFVSIWASQRPFATKDDIAKKIGYCTLEPKEKRTPKSTYTFERFRAIDKLNRLRILSSTIPSRPLVQEERDDVLNTLFSKKEVKYKELRKLLKLKDAERFNEIYYDPNESNEKNENRTFLSLESQHKIRTIIKQVEGKNINDSYRPIDLDTFAYALTVFKDDQDIRDYLQNRYVSSNGKKVLNLANLEYKEELIEELLQLSFAKFGHLSLKALKNILPYMEQGMPYHQACAEAGYEFNQRVNKEKQYLLPVIPTKDIANPVVIRSLSQVRKVVNGIIKKYGSPSAIYIELAREMGRVYKERKELEKQYNKNREINEGAKKHIVELHPQLGDPRGHDILKYKLWKEQDGRCAYSFQPISIERLFHIGYAEVDHIIPYSRSFDDSNSNKVLVIAAENQNKQNRTPYEWFGHNETKWQEFTSFVTTMKVSKKKKGLLLKKDLDEEQAEEFRSRHLNDTRYITRFIKTFIEDNLLFRTEESRKQYVHTVNGAYTSLMRKRWGFNKNRQENDLHHALDAVIIAVSLPFKHRVSAYFKRREEYAHNQLKREGEFFPEPWPGFIHELEIRMMQDSEKMKLAIESLDLKTYNESFINELKPIFVSRMPKRSIKGQIHEETLKRVRGLTETGYILTVKKTRLDQIPFDKNGDFPMFGKETDMKTYEAIKNRYLEFGKNKEKAFSTPLHKPAKNPNNAPIIRSVKIENKTNRVVMLDDKTAADNASIVRTEVFRHKETGNYFLTPVYVADALSKRVPDRLITPKKPYSEWKRITDDYEFLFSLYPNDLIRVKMPREKEAKTHAGEKCLWQENFVYFKGVDSADARIKVVDHMNSFEDRVGTQRLVTFEKYQVDPLGGINKVHGEKRYGF

SEQ ID NO: 651 - protein, 1057 aa, synthetic construct
  REGION 1..1057: note = LPG10194 nickase
MSNRVPYRLALALGTNSIGWCLLDLNGNGDPCGVRRMGVRIFPDGRDPKSKESLAADRRLARSMRRRRDRYLRRRSALMNALVAAGLMPADQAGRKALESEDPYELRARALTEPLTAGQVGRALFHLNQRRGFKSNRKAAGEENEAGKIKAGISALKAEIEASGETTLGAWLAARHRKRETVRARLDGAGAKASYEFYPERSLVHDEFQAIRTAQAPHHPDITAEQWDRIESVIFRQRPLRPVRPGKCTLFPDQERAPWALPVAQEFRILTEVGNLKLYRPGEEPRELSAGQHAQLFAKLCRSADLTFEKIRKELKLDPGLKVNLEGEKRDRLKGDAVTSALSAKKRFGPKWNALTPDDRRDIVGRLIEAEDEAELAGWLESVHGLASENAAHTAASPGLPDGYCRLSEKALVELVPLMRERLLRYDEAVRALDLHHSDFRPDGLLDELPYYGEPLERFIAFGSGEPSDPPELRLGRFPNPTVHIGLNELRKLVNRIVERWGKPADIVVELARDLKRSRDERDTIQREQAQNQRKNEDRFAKIKELGIDPRPDSMLRLRLWEELPKVGVGHVCVYTGEPIGIRRLLEGDVDIDHILPFSRTLSDGADNKIVCVRRANRFKRDRSPWEALGVTAVDGYSWAAIAERAEELPKNKRWRFLPDAMDRFEGERGFLDRQLVETRHLSRVARQYLASIVELNKVRVAPGKLTAMLRARWGLNKILSDGNLKNRSDHRHHAIDAAVLGVIDQRLVQLVAQAAARAEANELERLFDGLPDPFDGLAAMSFGDQVREKIRGITVSHRAEHGWQGRMHNDTAYGPVEAVNGVHTVVTRKPLSGLTAKEFPNIRDRVLAKALEDHVAAEAAAGRGFGDALGSFEWGGQPVRRVRMLDVLGNPIPIQDPSGTVFKVYKGDSNAWYEILRDPRGRWTGKIVSTFEAYRLHREWLAETGGDSGRGGGVFLDWAAKRVAGEAGTPLFRLFKGDLLALGEAPDRRIVRVVKFSEGQVALALHLEAGNLKARDADKGDPFKYQYCSPDSLRKQAARPAGVDLLGYVHDKGPLE

SEQ ID NO: 652 - protein, 1353 aa, synthetic construct
  REGION 1..1353: note = LPG10195 nickase
MRKNQEPYNIGLAIGTSSIGWSIMNDNFDLMRVKGKKGIGVRLYNEGQSAAERRMHRTARRRYGRRKWRLRLLEDFFDEHMAEVDDTFFARLKDSSISPKDDKKYRKSLLFPKSKGLTYQDDGEFYKKYPTMYHLRYALMTEHRKFDLREIYLAFHHMVKYRGNFLYDTSVDSFEAKNLDIKGKFDEINDLLSSYTDFYVDNSNAALVESILLEKNTTRKDKAKKIAKLLHVEDKEKVKNKKAKDLATQISNAVLGLKCNFHLIFELQQKYSFDLCSEKTEENIANLSEVLDENQKMLLMILKEIQDQVMLNAFVPSGMSLSEAMMQKYDAYGEQLKIYHELEHSVSDDSAAELRGAYCDYNDNIAKRDEFYNKLKKILSDMDKENVEQDVLESCGKLKKLIDENKLFIRQRTAANGVLPHQLHQIEMRKIIDNQKEYYPWLAEPNPNEKRRVYSKYKVEELIAFRIPYYVGPLVDPNNADKNKEARFSWMVRKKDGEITPWNFDDKVDRAESANNFIKRMKSKDTYLLGEDVVPKESMLYQKYEVLNELNNLRINDSGLSDSFEDVKLKQAIYNDLFKKQKIVKITDLQNYLVQNHKYLVKPKISGLADENRFLSSLSTYSDLKTIFGDKVDDRTYFNDFEKMVEYSTVFEDGHVYKQKLDEFTWLTKEEKDKIGKKRYRGWGKLSKKLLTGLRDKNNHTIMDNLWETNRNFMQIQTADEFPKQISEENERHLKGSVSDAINDMYTSPANKKAIRQVLRVVDDIQKAMGYAPSSISLEFAREDGPSVRTVSRANRMKSIYEKYASEVSEEVMKDLDGVIKDKKGLNDRLYLYFEQQGKDMYSGHPLDFDKVISGQEYDIDHILPQAVIKDDSLDNRVLTTKALNNDVKSKGVPCRMFNGMHSFWKNLYDKGFISRRKFNNLTTNPENIDKYKMKGFVNRQLVETRQIIKLVANVLNDKYQNDDVDIIEVRAELTHDVRKHFKFYKNRNVNDYHHAFDAYLTNFVGQYLFKKYPNLRPLFDYNDFMKVSDNVFKQLRGNNFLGEFLNKTGDIISTDGNFVLNKEEMINKLNKAYAFKKILVTKEVVQRTGAMFDETVYSAKSGKTLIKLKKDRDTSIYGGHSGNKDAYMVIVYTGKGYKVIGIPVRYAERLDSLRKNDVDGFNDMLNRLIESKFSKKSKNKQFRIVIDKVLYNQLIQDGNLLFTLGSAAYQHNFRQLFLDKKALEILDKVATPKPTDDDLIMVYDQILERVDKYFELYDNGGCREALHKGRELFCKLPVSKRNEKDVTKRDMIYTILDGLHANGKTVSCLEIGKGGAFGKFQKQNGINLSENAKLIYQSPTGLFERVVYLKDL

SEQ ID NO: 653 - protein, 1086 aa, synthetic construct
  REGION 1..1086: note = LPG10200 nickase
MPFRQPVSYAFAMGTNSIGWCVFRLSAAGHPVAIADAGVRIYSDGRDPQSKTSLAVARREAKAAARRRDRTKRRQKATLRTLAEYGLMPGGKDERERLLRETADSADRNAPANDPLNLRARALTEKLPLHHIGRALFHLGQRRGFKSNRKTDRRDNDKGKIAIGIDRLRDAIREAKAETLGVFLASRRAQGLHVRLRAGSSVILDDGYDFYPVRSLLEEEFRHIWDAQAVHYPDVLTEARGEHLFKVIFHQRPLKKPRIGSCTFNPLEQRLAKAHPLFQAFRLYKEVNELEVVAPDLSQRKLTLDERDALVLKLRGAKTAKYKTLRKDLKLTPDMRFNKESENRVDMAGDEVTAALSAKGLFGPRWNTLSMDSQWKVIERIQEEENPFVLHQWLVETHGLSDDAAEAVAACHLPEGYGRLGHTALSTMLEELRADVIPEAKAAERAGYNHSYFGTGEIFDELPKYQEVVARSIPPGTGDLEDEYDVRKGRITNPTVHIGLNQLQRLVNGLIRRFGKPAEIAVELARDLKTNEKKKTEINRRIGENTRAARQRSEKIAELRKDTPALVDNGYNRLLLKLWEELNPAKPEDRCCIYTGKPISISMLFSGAVDVDHILPYSRTLDDGQGNKLLCLKEANRVKRNRAPSEVTEWANHYDEILERANRLPKPKRWRFARDVMADFDADSGFLDRQLTDTQYLSRLAREYLCSLYPEKHEQWRVRVIPGRMTEMLRRHWGLNTLLPDHNYSDAKNRNDHRHHAIDAAVVGVTTRSMLQRISTEAARREEQELEDVVKGIPVPWEHFRDDLQQALNNIVVSHKPDHGTVGLDDKGKWQTAGKLHNDTAYGLTGEVDARGNTIVVRRKMLLSLTDKDIPAIRDDELRARLYSAAGGLSGKELQQALLDFARNDPKYRGIRRVRVTETLAVIPIRDKDGNVYKGYKGDANYRYDVWEMKDGKWQAEVISMFDAHQKGWESPVRKANPTARKVLSLQQNDMVAYEHPSDGYTIARVVKFASSGQIVFARNNEGGSLKARDANRDDPFKYFSKTANGLREIKARQIRIDETGRVYDPGPRDRESRMIGNQKLKTIAI

SEQ ID NO: 654 - protein, 1076 aa, synthetic construct
  REGION 1..1076: note = LPG10203 nickase
MKYSIGLAIGIASVGWAVINEDLGRIENMGVRIFDAAEHPKDGSSLSTPRREARSARKRLRRRRHRVERTRYFMIQKGLLTQVQMEQLYDWKHGDLDIWLIRVNALERKLTNREFARVLIHHTKNRGFKSNRKSELKEGDNGVVLSAVQENKRLMEEKGYQTIAEMLLLDTKFKGLKRNKGGDYSHVVARSELEHEIRLVFAKQREFGHRFASVENEEGYIAIWSSQRPFATKDDISKKIGYCTLEPKERRAPKSTYTFERFRALDKLARLRILSSTKENRALTDDERELILNSLFSKKEMKYKELRKLLKLQDTDRFNEIFYDPEATADKNENRTFLSLESQYKIRSIIQQVEGKKINDSYRPIDFDTIAYALTVFKDDQDIRDYLLNDYVESNGKRTTNLANRVYKEEVIEELLQLSFAKFGHLSLKALKNILVHMEQGLPYYKACEEAGYQFNSNQNKDKQRILPVIPAKEIANPVVVRSLSQVRKVVNGIIKKYNIPSAMYIELARDMGRVYKERRDIEKQYDKNRQINEAAKERIIEYSEGRFTPKAHDILKYKLWQEQGGRCAYSFAPIPIESLFNIGYVEVDHIIPYSRSFDDSNNNKVLVLSAENQNKRNQTPFEYFGHDVVKWEQFKSFVTTLKVAKRKKMLLLKQNFDEQQAEEFRSRNLNDTRYITRFIKNFIEDNLQFREEEGNKQHVFTLNGAYTSLMRKRWGFNKNRRENDLHHALDAVLIAVSWPFKHQVSAYFNRREEYARNQLKREGEYFPEPWPGFIHELEIRMMQDEDKMKLALESLDLKTYDDDFINRVKPIFVSRMPKRSIKGQIHEATLKRVRGNTEDGYIRTVKKVRLDQIPFEKNGNFPMYGKETDLKTYSAIKKRFLEYGDRKKAFATPLYKPAKDPSKAPIIRSVKIEEKANRVVHLDEKTVADNASIAKTEVFRHRKTGQYYLTPIYVADVVNGIIPDRLISTKKPYSEWRRITDEYEFLFSLYPNDLIRIKMPKEKETKNFMKETHIWQEGFMYYRGVHSGSAGVRMINHMNSFEDEIGVQKLELFEKYQVDPLGGITKVHGEKRYGI

SEQ ID NO: 655 - protein, 1071 aa, synthetic construct
  REGION 1..1071: note = LPG10207 nickase
MKKLDYRIGLAIGTNSIGWGIIELSWNRDKEQYEKVRIVDKGIRMFDKAEIPKTGASLAEPRRIARSSRRRLNRKSQRKKDIRNLLIQHEVINQKELDSLYPLSKKSIDIWDIRLDGLDRLLNRLEWARLLIHLAQRRGFKSNRKSELKDEETGKVLSSIQANEKRLSLYRTVGEMWMKDADFSKYDKRRNSPNEYVFSVNRVDLEKEIVTLFEAQRNFQSSYASVDLQETYLQIWAHQLPFASGNAILNKVGYCSLLKGKEKRIPKATYTFQYFSALDQINRTRLGPEFQRVTTEQRNLILDKVFQRTDYYKKKTIPEVTYYDIRKWLALDETIQFKGLIYDPNEELKKIEKKPFINLKPFYEIKKIVANYTEKTNEAFSTLDYDTVAYALTVYKTDKDIRSYLKSPHNLSKRCYDDQLIEELLSLSYTKFGHLSLKAINYVLPIMQEGRTYKEAADQLGFDTTHLKKEKRSKFLPPISDEITNPIVKRALTQARKVVNAIIRRYGSPHSVHIELARELSKSREERNKIKAAQDENYKKNKGAISILSEHGILDPTGYDIVRYKLWKEQGERCAYSLKTIPPDTFFNELRKERNGSPILEVDHILPYSQSFIDSYDNKVLVYSDENRKKGNQIPYFYFLETNKDWDSFEKYVRSNKLFSKKKSGYLLKKAYLPRESELIKERHLNDTRYASSFLKNFIEQNLQFKEIEGNPRKKHVQTVNGIITAHLRKRWGLEKDRQETYLHHAMDAIIVACTDHHMVTKVTEYYQTKESNKSVKKPYFPLPWEGFRDELLSHLASQPIAKKISEELKAGFQPSNYILVSRMPKRSITGAAHDQTIMKKGGIDKKGKTIIIKRLQLKDIKFDENGDFKMVGKEQDIATYEAIRQRYLKHGKNSKKAFETPLYKPSKKGKGNLITKVKVEVQTKSFVREVNGGVAQNGDLIRIDLFEKDYKYYMVPIYVLDTVCSELPNKVVTSSKGYEQWLTLDNSFMFKFSLYPYDLVRLIKGDEDRFLYFSTLDIDSDRLIFKDVNKPSKKNEYRYSLKTIEDLEKYDVGVLGDLSLVRQEVRRKFQ

SEQ ID NO: 656 - DNA, 4177 bp, synthetic construct
  source 1..4177: mol_type = other DNA
  misc_feature 1..4177: note = SV40-ARM148-Linker-n LEG165 -Linker-Nuc
atggccccaaagaagaagcggaaagtcgactataaagaccatgatggcgactataaagatcatgacattgattataaagacgatgatgacaagatgagcaaccccgagttcacacacgagtactggatgcggcacgccctgacactggcccgcagagccagagatgagggcgaagtgcctgtgggcgccgtgctggtcctgaacaaccaggtgatcggcgaaggctggaaccgggccattggactgcatgaccccaccgcccacgccgaaatcatggccctgagacagggcggactggtgctgcagaactaccggctgatcgacaccaccctgtacgtgacattcgagccatgtgtgatgtgtagcggcgctatggtccattctagaatcggcaccctggttttcggcgtgcggaacagcaagagaggagctgctggcagcctgatgaacgtgctgaattatcctggaatgaatcaccaggtgaagaccatcggcggcgtgctcgcccctgaatgcagcggcctgctgtgcgacttctacagaatgcctagacaagtgtttaaccagcagaaagccgagctgaagtccatcaacgactccggcgggtcttccggcggctctagtgggagtgagacgccaggaacgtctgaatctgctactcccgaatctagcggcggatccagtggcggtagtatgaaatactccatcggtctggctattggtattgcgtctgtcggctgggccgttatcaacgaagatatcgaacgtatcgaagatatgggcattcgtatttttgacgcagctgagaacccaaaagacggctccagcctgagcactccacgccgtgaagcacgttccacgcgcaaacgcctgcgccgtcgccgtcatcgtgtggaacgcattcgtcagtttatcattcagaaaggcctcctgactcaggttcagatggaacagctgtatgattggaaggctgaggacctggatatttggctgatccgtgtaaacggtctggaacgtaaactgacggaccgcgaattcgcacgtgtactgattcacctggtaaaaaaccgtggtttcaaatctaaccgcaaatccgaactgaaggaaggtgacaacggcgtagtgctgtctgctgtacaggaaaataaacaactgatggaggaaaaaggctatcagaccatcgcggaaatgctcctgtttgacgaacgttttgaaggctgcaaacgcaataaaggcggtgcttactctcacgttgtcgcacgtagcgacctggagcacgagatccgtctgattttccagaaacagcgtgaatatggccacgcgttcagcacgaccgaaaatgaagaggcctatattaacatctggagctcccagcgcccattcgcgaccaaagatgacatcgcgaagaaaatcggctactgcactctggaaccaaaagaaaaacgcacgccgaaatctacctacactttcgaacgcttccgtgcgattgacaaactgaaccgtctgcgtatcctgtccgcaattaccccatctcgtgaactgacccaggaagagcgcgacgatgtgctgaacagcctgttcagcaagaaagaagtcaaatataaggaactgcgcaagctcctgcgtctgaaagatgaacaacgtttcaatgagatttactatgcaccaaacgagtccaacgaaaaaaacgagaaccgtacctttctgagcctggaatctcagcacaagatccgtgcaattatcaaacaggtcgaaggcaaaaacgtgaacgattcctaccgcccgatcgacctggataccttcgcatacgccctgaccgttttcaaagacgatcaggatatccgtgactacctgcaaaaccgctacgtgagctctaatggtaagaaagtcctcaatctggccaacctggaatacaaggaaaaactgatcgaggaactcctgcagctgtctttcactaaatttggccacctgtccctgaaagctctgaaaaacattctgccgtacatggaacagggcatgccataccaccaggcatgcgcagaagccggctacacttttaaccagcgcgttaacaaagaaaaacagtacctcctgccggtcatcccgactaaagacatcgcaaacccggtcgtaattcgttccatgtcccaggttcgtaaagtggtaaacggtattatcaaaaagtatggttccccgagcgcgatttacatcgaactggcccgtgaaatgggccgcgtctataaagaacgtaaagaactggaaaaacaatacaacaaaaaccgtgaaatcaacgagggcgcaaagaaacatattgttgaactgcatccgcagctgggtgacccgcgcggtcatgatatcctgaaatataaactgtggaaagaacaggacggccgttgcgcgtactctttccagccgatctccatcgaacgcctgttccacatcggttacgccgaagtcgatcacatcattccatactctcgttccttcgacgatagcaactctaacaaagtgctggtgatcgccgcggaaaaccaaaacaagcagaaccgtactccgtacgaatggttcggtcataatgaaatcaaatggcagaagtttaccagctttgttacgaccatgaaagtgagcaaaaagaaaaagggtctgctcctgaagaaagacttcgatgaagaccaggctgaggaatttcgttctcgtcatctgaacgatacgcgctacatcacccgttttatcaaaacgttcattgaagacaacctcctgttccgtacggaggaaaaccgtaaacagtatgcacataccgttaatggtgcgtacactagcctgatgcgcaaacgttggggtttcaacaaaaaccgtcaggaaaacgatctccatcacgcgctggacgctgtgattatcgcagttagcctgccgttcaaacaccgtgtctctgcgtacttcaaacgtcgcgaagagtatgcacacaaccagctgaaacgtgagggcgaatttttcccggagccgtggccggaatttatccacgaactggaaattcgcatgatgcaggaaccggaaaaaatgaagctggcgatggagtccctggacctgaaaacttatgatgaatccttcatcaacgagctgaacccggtgttcgtgtctcgtatgccgaaacgttctatcaaaggtcaaatccacgaagagaccctgaagcgtgtacgcggttatactgaagatggctacatccgtactgttaagaaagtgcgtctggatcagatcccgttcgataagaacggcgacttctctatgttcggtaaagaaactgacatgaaaacctacgaagcaatcaagaaccgttatctggaattcggcaaagataaaaagaaagccttcaactcccctctgtacaagccggcgaaaaacccggaaaacgccccgattatccgctctgtaaaaatcgaagacaaagcgaaccgtgtggttatgctggatgagaaaacggctgcggacaacgcgagcatcgtgcgtaccgaagtgttccgtcataaaggtaccggtaactattttctgactccggtgtacgttgctgacgttctgtctaaacgtatcccggaccgcgtaattacgaccaagaaaccgtattctgaatggaaacgtattactgatgacttcgaattcctgttttctctgtacccgaacgacctgatccgcgttaagatgccgaaagaaaaagaaaccaaaactaatatgaaagagaaatacgtctggcaagaaaacttcatgtacttcaaaggcgttcactccggttccgccggtgttcgcatgatcgaccatatgaacagctttgaagacgaaatcggtgtacagaaactgattatcttcgaaaagtatcaggttgacccactgggtcgcatcaccaaggttcacggtgagaagcgtcacggcatcagcggcggaagcaaaagacctgccgctacaaagaaggccggccaggccaagaaaaagaagtaatgaggatccgcaggcctctgctagcttgactgactgagatacagcgtaccttcagctcacagacatgataagatacattgatgagtttggacaaaccacaactagaatgcagtgaaaaaaatgctttatttgtgaaatttgtgatgctattgctttatttgtaaccattataagctgcaataaacaagtt

SEQ ID NO: 657 - DNA, 4159 bp, synthetic construct
  source 1..4159: mol_type = other DNA
  misc_feature 1..4159: note = SV40-ARM148-Linker-n LEG167 -Linker-Nuc
atggccccaaagaagaagcggaaagtcgactataaagaccatgatggcgactataaagatcatgacattgattataaagacgatgatgacaagatgagcaaccccgagttcacacacgagtactggatgcggcacgccctgacactggcccgcagagccagagatgagggcgaagtgcctgtgggcgccgtgctggtcctgaacaaccaggtgatcggcgaaggctggaaccgggccattggactgcatgaccccaccgcccacgccgaaatcatggccctgagacagggcggactggtgctgcagaactaccggctgatcgacaccaccctgtacgtgacattcgagccatgtgtgatgtgtagcggcgctatggtccattctagaatcggcaccctggttttcggcgtgcggaacagcaagagaggagctgctggcagcctgatgaacgtgctgaattatcctggaatgaatcaccaggtgaagaccatcggcggcgtgctcgcccctgaatgcagcggcctgctgtgcgacttctacagaatgcctagacaagtgtttaaccagcagaaagccgagctgaagtccatcaacgactccggcgggtcttccggcggctctagtgggagtgagacgccaggaacgtctgaatctgctactcccgaatctagcggcggatccagtggcggtagtatgtctgaactggactaccgtatcggtctggctatcggcaccaactctatcggttggggtgttatcgaactgttctggaagaaagatcgcgaacgttacgaaaaggtaaaaatcgtcgacaaaggtgttcgtatgttcgacaaagcggagatcccgaagaccggtgcgtccctggcagaaccgcgccgtatcgcgcgttctagccgtcgccgtctgaaccgtaaaagccagcgtaagaaagacattcgcaatctcctggttcagcatggtgttattacgcagaaagaactggacagcctgtacccgctgtctaagaaagcgatggatatctgggacatccgtctggacggcctggatcgtctcctgaaccacttcgaatggacgcgtctcctgatccacctcgcacaacgccgtggtttcaaatctaaccgtaaatccgaactgaaggatgcggagaccggtaaagttctgtctagcatccaggtaaacgaaaaacgtctgtccctgtatcgcaccgttggtgaaatgtggattaaagacgcagacttcatcaaatacgatcgccgtcgcaactccccaaacgaatacgtgttttctgtttcccgtgcaaacctggaaaaagagatcgtgaccctgttcgagactcaacgcaaattccagtccccgtacgctagcaaaaacctgcaagaggcttacctgcagatctgggctcaccagctgccattcgctagcggtaatgcaattctgaacaaagtaggttactgctctctgctcaaaggcaaagagcgtcgcattccgaaagctacttacacctttcagtacttcagcgccctcgatcaagttaatcgtactcgtctgggtccggacttccagccgttcacccaggaacagcgtgaaattatcctggacaaaatgttccagcgcactgactattacaaaaagaaaaccgttccggaggttacctattacgatattcgtaaatggctggaactggacgagaccatccagtttaaaggtctgaactacgatccgaacgaggaactgaagaaaatcgaaaagaaaccattcattaacctgaaagcattttatgaaattaaaaaggtggttgctaactatgcagaacgtaccaacgaagcgttctccaccctggactatgatgcaatcgcatatgctctgaccgtatacaaaaccgataaagacattcgctcttacctgaaatctagccacaacctgagcaaacgttgctacgacgatcagctgatcgaggaactcctgagcctgtcctatacgaaattcggtcacctgtctctgaaagccatcaattacgtgctccctatcatgcaagaaggtcgcacctacaaagaagctgcagaccagctgggttacgacaccactggcctgaagaaagaaaaacgtaacaaattcctgccgctgatcccggatgaaattaccaacccgatcgtgaaacgtgcactgactcaggctcgtaaggttgtgaacgccatcattcgtcgctatggttccccgcacagcgtacatatcgagctggcacgcgaactgtctaaaaaccacgacgaacgtaagaaaatcgtttccgcacaggatgaaaactacaagaacaataaaggcgcgatctctgtactgtccgaatatggcattctggacccgaccggctatgatatcgtgcgctacaaactgtggaaagaacagggcgaacgctgcgcttattccctcaaagagatcccgccagacactttctttaacgaactgaagaaagaacgtaacggctccccgattctggaagtcgatcacgttctcccatactctcagtctttcatcgactcttaccacaacaaggtactggtctactctgacgaaaaccgcaagaaaggtaaccgtatcccgtacacctatttcctggaaaccaacaaggattgggaatacttcgaaacttacgtccgttccaataaactgtttagcaaaaagaaacgcgaatacctcctgaagaaagcctatctgccgcgtgaatccgaactgatcaaagaacgtcacctgaacgacacgcgctacgccagcgcgttcctgaaaaacttcatcgaacagaacctgcagttcaaagaagtggaggataacctgcgtaaacgccgtgtccaaaccgttaacggtgtcattacggcgcacttccgtaagcgttggggcctggaaaaggaccgtcaggaaacctatctccatcacgccatggatgctatcgtcgttgcatgtaccgatcatcacatggtaacccgtgttacggaatattaccagattcgtgaaagcaacaaatccgttaagaaaccgtattttccgatgccttgggaaggtttccgcgacgaactcctgtcccatctggcgtctcagccgattgcgaagaaaatctccgaggaactgaaagctggctaccagtccttcgactacatcttcgtatcccgtatgccgaaacgttccgttaccggcgctgcacacgatcagaccattatgcgcaaaggtggcattgacaagaaaggtaaaaccatcattatcaagcgtctgcagctgaaagacatcaaatttgatgaaaacggtgacttcaaaatggtgggtaaagagcaggatatggcgacttatgaagcaattaaacgccgttacctcgaacacggtaagaaatccgaaaaggcctttgaaactccgctgtacaaaccatctaaaagcggtcgtggcaacctgatcaagcgtgtgaaaatcgaggtacagaccaaaagcttcgtgcgtgaagttaacggtggcgtggcgcagaacggtaacctggttcgtgttgacctgttcgaaaaagacgcaaaatactatatggttccgatctacgtgccagatactgtcttctctgaactgccaaacaaagctgtgacttcttccaaaggctacaaacagtggctcaccctggacaactctttcatgttcaagttctctctgtacccgtacgacctggttcgtctggtaaaaggtaatgaagaccgtttcctgtacttcggtaccctggacatcgattctgatcgcctgattttcaaggatgtgaacaaaccgtccaaacagaccgaataccgctacagcctgaaaactatcgaagatctggaaaagtacgaagttggcgttctgggtgacctgcgtctggttcgcaaagaaacccgccgtaatttccagagcggcggaagcaaaagacctgccgctacaaagaaggccggccaggccaagaaaaagaagtaatgaggatccgcaggcctctgctagcttgactgactgagatacagcgtaccttcagctcacagacatgataagatacattgatgagtttggacaaaccacaactagaatgcagtgaaaaaaatgctttatttgtgaaatttgtgatgctattgctttatttgtaaccattataagctgcaataaacaagtt

SEQ ID NO: 658 - DNA, 4162 bp, synthetic construct
  source 1..4162: mol_type = other DNA
  misc_feature 1..4162: note = SV40-ARM148-Linker-n LEG168 -Linker-Nuc
atggccccaaagaagaagcggaaagtcgactataaagaccatgatggcgactataaagatcatgacattgattataaagacgatgatgacaagatgagcaaccccgagttcacacacgagtactggatgcggcacgccctgacactggcccgcagagccagagatgagggcgaagtgcctgtgggcgccgtgctggtcctgaacaaccaggtgatcggcgaaggctggaaccgggccattggactgcatgaccccaccgcccacgccgaaatcatggccctgagacagggcggactggtgctgcagaactaccggctgatcgacaccaccctgtacgtgacattcgagccatgtgtgatgtgtagcggcgctatggtccattctagaatcggcaccctggttttcggcgtgcggaacagcaagagaggagctgctggcagcctgatgaacgtgctgaattatcctggaatgaatcaccaggtgaagaccatcggcggcgtgctcgcccctgaatgcagcggcctgctgtgcgacttctacagaatgcctagacaagtgtttaaccagcagaaagccgagctgaagtccatcaacgactccggcgggtcttccggcggctctagtgggagtgagacgccaggaacgtctgaatctgctactcccgaatctagcggcggatccagtggcggtagtatgtctgagctggactatcgtatcggtctggcaatcggcactaactctatcggctggggtgcaatcgagctgtcctggaacaaggatcgcgaacgttacgaaaaagttcgcatcgttgataaaggcgtacgtatgttcgataaagctgaaatcccaaagactggtgccagcctggcggagccgcgccgtatcgcgcgttcctctcgtcgccgtctgaaccgcaagtcccagcgcaaaaaggacatccgtaacctgctcgttcaacatggtgtcatcattcagaaggaactggatagcctgtatccgctgagcaagaaatctatggatatctgggatattcgcctggacggcctggaccgtctcctgaaccactgcgaatgggcacgtctcctgattcacctggcacagcgtcgcggttttaaatccaaccgcaaatctgagctgaaagataccgaaaccggcaaagttctgtccagcatccaagttaacgaaaagcgtctgtccctgtatcgcaccgttggcgagatgtggatgaaagatccggacttcaacaaatatgaccgcaaacgcaatagcccgaacgaatatgttttctctgtatcccgtgccgatctggaaaaggaaattgttacgctgttcgaagctcagcgtaaattccagtcttcctatgcatctaaagatctgcaggagacctacctgcagatttgggctcatcagctgccgttcgcgtctggtaacgccatcctgaacaaggtgggctactgcagcctcctgaagggtaaagagcgtcgcatcccgaaagcgacttacaccttccagtactttagcgctctggatcaggtcaaccgtacccgcctgggtccggactttcagccgtttacgaaagaacaacgtgaaatcattctggacaaaatgttccagcgcaccaactattacgaaaaaaagaccatcccggaagttacctattacgatattcgtaaatggctggaactggatgaaaccatccagttcaaaggcctgaactacgacccgaacgaggaactgaagaaaatcgaaaagaaaccgttcattaacctgaaagcgttctacgagatcaagaaagtggtcgctaattacgctgagcgtactaacgaggaattctctacgctggattatgatgccatcgcatacgcactgaccgtttacaaaaccgataaagatatccgcagctatctgaagtctagccataacctgtctaaacgttgctacgacgatcagctgatcgaggaactcctgtctctgtcttacaccaagttcggccacctgtctctgaaggctaccaactacgtgctgccgatcatgcaggaaggtcgtacttacaaggaagcagctgatcagctgggttatgacaccactggcctcaagaaagaaaaacgcaacaagttcctgccactgattcctgacgaaatcacgaacccgatcgtgaaacgtgccctgacccaggcgcgtaaggtggttaacgccattatccgccgttatggtagcccacactccgtgcacattgaactggcacgcgaactgagcaagaaccatgacgaacgtaagaaaatcgtttccgcgcaggacgaaaactacaagaaaaacaagggtgctattagcgttctgagcgagtacggtatcctggatccgaccggttacgacatcgtgcgctacaaactgtggaaggaacagggcgaacgctgcgcatatagcctgaaagaaattcctccggacacctttttcaacgaactgaagaaagaacgtaatggtagcccgatcctggaggtcgaccatgtactcccgtacagccagtccttcatcgattcttaccacaacaaagttctggtgtatagcgacgaaaaccgcaagaaaggtaaccgtatcccgtacacctattttctggagaccaacaaagactgggagtactttgagacttacgttcgttctaacaaactgttctctaaaaagaaacgtgaatacctcctgaagaaagcttacctcccacgtgaatctgaactgatcaaagaacgtcacctgaacgatactcgttacgcatctgcgttcctgaaaaactttatcgaacagaatctgcagttcaaagaagtagaagataacctgcgtaaacgccgtgtgcagaccgttaacggtgtgatcaccgcgcacttccgtaaacgttggggtctggaaaaggaccgccaggaaacttacctgcatcacgcaatggatgcaattgtcgtagcttgcaccgaccatcacatggttactcgcgtaaccgaacattaccagatccgtgaatccaacaaatctgtgaagaaaccgtatttcccaatgccgtgggaaggcttccgtgacgaactgctctctcatctggcatctcagccgattgccaagaaaatctctgaggaactgaaagctggttaccagtccttcgattacatcttcgtttctcgtatgccgaagcgctccgtaaccggcgccgcacacgatcagactatcatgcgtaaaggcggtatcgataagaaaggtaagactatcattatcaaacgcctgcagctgaaagacatcaaattcgacgaaaacggcgactttaaaatggtaggtaaagaacaggatatggctacctacgaagctatcaaacgtcgctatctggaacatggtaagaaatccgaaaaagccttcgagaccccgctgtacaaaccatccaaaagcggccgcggcaacctgatcaaacgcgttaaaatcgaagttcagactaaatcttttgtgcgtgaagtgaacggtggcgttgctcagaacggcaacctggtccgtgtcgacctgttcgaaaaagatgcaaaatattacatggttccaatttacgtaccagacactgttttctctgaactcccgaacaaagctgttacttcctctaaaggctacaaacaatggctgactctggataactccttcacgtttaaattcagcctgtatccttacgacctggttcgcctggttaaaggtgatgaagaccgtttcctgtacttctccaccctggacattgactccgatcgcctgatcttcaaagacgtcaaccgcccatccaagcagaccgaataccgttactccctcaagaccatcgaagacctggaaaagtacgaagtgggcatcctgggcgacctgcgtctggttcgcaaagagacccgccgtaactttaaccgtagcggcggaagcaaaagacctgccgctacaaagaaggccggccaggccaagaaaaagaagtaatgaggatccgcaggcctctgctagcttgactgactgagatacagcgtaccttcagctcacagacatgataagatacattgatgagtttggacaaaccacaactagaatgcagtgaaaaaaatgctttatttgtgaaatttgtgatgctattgctttatttgtaaccattataagctgcaataaacaagtt

SEQ ID NO: 659 - DNA, 4198 bp, synthetic construct
  source 1..4198: mol_type = other DNA
  misc_feature 1..4198: note = SV40-ARM148-Linker-n LEG171 -Linker-Nuc
atggccccaaagaagaagcggaaagtcgactataaagaccatgatggcgactataaagatcatgacattgattataaagacgatgatgacaagatgagcaaccccgagttcacacacgagtactggatgcggcacgccctgacactggcccgcagagccagagatgagggcgaagtgcctgtgggcgccgtgctggtcctgaacaaccaggtgatcggcgaaggctggaaccgggccattggactgcatgaccccaccgcccacgccgaaatcatggccctgagacagggcggactggtgctgcagaactaccggctgatcgacaccaccctgtacgtgacattcgagccatgtgtgatgtgtagcggcgctatggtccattctagaatcggcaccctggttttcggcgtgcggaacagcaagagaggagctgctggcagcctgatgaacgtgctgaattatcctggaatgaatcaccaggtgaagaccatcggcggcgtgctcgcccctgaatgcagcggcctgctgtgcgacttctacagaatgcctagacaagtgtttaaccagcagaaagccgagctgaagtccatcaacgactccggcgggtcttccggcggctctagtgggagtgagacgccaggaacgtctgaatctgctactcccgaatctagcggcggatccagtggcggtagtatggttaaactccagtacgttctgggtctggctatcggcatcgcgtcttgcggctgggccgtgatcaacactgaaaaagaacgcatcgaagacctgggcgttcgtatttttgataaagcggaaaacccgaaagacggcaaatccctggctactccgcgccgtgatgctcgctctacccgccgtacgctgcgtcgcaagaaacaccgtatgcagcgtatcaaaatcctcctggttaaacacggcctcctgtctaaaaccgagctggatcatctgtatgaaagcgcgaccgagaacgacgtttgggatctgcgcctgaacgcactggaacgtcgcctgaacccgaaagaattcgcacgtgtgctgatccacctggcaaaacgtcgcggtttcaagtccaaccgtaaggaaactaccctcagcgagtctggtcagatcctggaaaacatttccgaaaaccaacagatcatggaacaacagaactatcgtaccgtcggcgaaatgattctgaaagataagaaatttgaaaaccacaaacgcaacaaagacggtacctacatcggtaccgttacgcgtcaacagctgcaggatgaaatccatatgatcttcaacgcacagcgcctgttcaagaataacttcgcgactgaggaattcgaatctcattatctggaaatctggtcctctcagcgtccgtacgcgtctaaagaccagatcgaaaagatgatcggctactgtactctggaaccgaaagaaaaacgtgcaccgaaagccagctggagcttccagtacttcgtggctctccagaccatcaataacctgcgtctgatctctaaagatcgtatcgaggaactgtccttcgaggaaaagaaacaaatcatgaacctggcgctggaaaaaccgatcgtgaaatatatcgacatccgcaaactcctgagcattagcaacgacctgcatttcaataacctcctgtactccactgacactgtcgatactaccgttgagaaccgtaaatgtatcgaactgaaagaatatcacagcatcaacaaagtatacaagcagatctacggtaaaggtgttccgaacctcctgccgatcgactatgataccatcgcgtatgcactgactatcttcaaagatgacaaagatattctggaatatctgcagaacaaatatgtgaacgccaaaggcaaaccgatcaacaattctgccaagaaaacttacgatgacatcttcattcaggctctcctgacgctgaacttcactaaaatgggccacctgtctttcaaaagcctgaaaaacatcattccgtttctggaagacggcctgagctacgacaaggcttgcgaaaaagcaggttataacttcaaaggtacttcctataccgaaaaaactaaatatctcccggttatccctcagaacactaacccggtcgttcaccgtgcactgtctcagactcgtaaagtcatcaacgctattatcaaaaagtacggctctccgaaagccatccatatcgaaaccgcgcgcgagctgtccaaaaccttccaggaacgtaaggaaatcgattctatgtaccaagacaactctaagaaaaatgagcatgctatccgtaaactgaaagaactgggcaacatcaacccgtccggcatcaacatcgtgaaattcaaactgtggaacgaacaggacggtcgttgtatgtactctggtaaatacatcgaaccgcaccgcctgttcgaggaaggttacaccgaagttgaccacgttctgccatactctcgttccctggatgacagctataataacaaagctctcaccctgggcaccgaaaaccagggtaaaggtaacaaaactccatatgaatttatgggcaacaccagcatctggaacgagttcgagacccgtgtgcagtctaacaagaaaattaacaaacgcaaacaacagaaactgctcctgcagaacttcagccacgcccgcgaacaggaatttatcgaacgcaatctgaacgacacccgttatgccaccatttacctgagctctctgattcaacagcatctgatcttctccgaatcttcccgtgaaaagaaagttcataccgttagcggtatcattactagccatctgcgttctcgttggggtttcaacaaagaccgtaaagaaggtcacattcatcacgcactggatgcagtaatcgtagcggtaacctctgatcatatgatccagcgtgttactaagtactataaactgaaggaactgaaccgtaacctgcaagccaaacgcattcctttcccggaaccgtgggaaggtttccgtctggaactggaggcgcgtatctccccgaacacccaacagtacctgaaaggtattcgtttcaaaaattatgcagatatcaacctgaccgaaattaaaccgatcttcgtaagccgtatgccgaaacgttccatcacgggcgaactgcaccaggaaaccatccgcaaatttatcggttacaacgaaaaaggtaaagttctgaccactatcaaaactaaactcgaggacatcccgttcgatgccaacggcgacttcccgatgtatggcaaggaaaccgatctgtacacctataacgcaatcaaagaacgttacctgagccacaagaaagacaaacgtaaatccttccaggaaccgctgtataaaccgaccaaaaccggcgagatcggtccgctgattaagtctatcaagatcattgatacccgcaccatcgttaacccggtcaaccagggcaaaggtgttgtgtacaactccaaaatcgcgcgtaccgatgttttcaagaaaaacgacaaatattacctgattcctatctacaccatcgatctcatgaaaaacattctgcctcagaaagccatcactgccggcaaaggttatgaggattggactaccatcgaccactctttcacgttcctcttcagcctgtttccgaacgacctgatccaaatcgtgccaactaaaaaccgtactatcaaagctaaaaccactgtgagcaagaaagaagtgctcctgccttctctcacgggttactttaaaggtgtccactccggcactgccggtattaccgttgagactcacgacggttctgttatcgctaacatcggttctaaacagctcctgatcttcgaaaaataccaagtggatatcctgggtcactacaccaaaatcaaggaggaaaaacgtatcggcatggctacctacaacgacaacaagaaatccaccgcgttctctagcctgagcggcggaagcaaaagacctgccgctacaaagaaggccggccaggccaagaaaaagaagtaatgaggatccgcaggcctctgctagcttgactgactgagatacagcgtaccttcagctcacagacatgataagatacattgatgagtttggacaaaccacaactagaatgcagtgaaaaaaatgctttatttgtgaaatttgtgatgctattgctttatttgtaaccattataagctgcaataaacaagtt

SEQ ID NO: 660 - DNA, 5410 bp, synthetic construct
  source 1..5410: mol_type = other DNA
  misc_feature 1..5410: note = SV40-ARM148-Linker-n LEG186 -Linker-Nuc
atggccccaaagaagaagcggaaagtcgactataaagaccatgatggcgactataaagatcatgacattgattataaagacgatgatgacaagatgagcaaccccgagttcacacacgagtactggatgcggcacgccctgacactggcccgcagagccagagatgagggcgaagtgcctgtgggcgccgtgctggtcctgaacaaccaggtgatcggcgaaggctggaaccgggccattggactgcatgaccccaccgcccacgccgaaatcatggccctgagacagggcggactggtgctgcagaactaccggctgatcgacaccaccctgtacgtgacattcgagccatgtgtgatgtgtagcggcgctatggtccattctagaatcggcaccctggttttcggcgtgcggaacagcaagagaggagctgctggcagcctgatgaacgtgctgaattatcctggaatgaatcaccaggtgaagaccatcggcggcgtgctcgcccctgaatgcagcggcctgctgtgcgacttctacagaatgcctagacaagtgtttaaccagcagaaagccgagctgaagtccatcaacgactccggcgggtcttccggcggctctagtgggagtgagacgccaggaacgtctgaatctgctactcccgaatctagcggcggatccagtggcggtagtatggctaaacagaaatacaccgtcggcctggcgatcggtaccaactctgttggttgggcagtaatcaaccaagacttcaagctggttagcggtaagaaacacatcaatgacaacggtaagcagaagcgtagccgtaccaacctgtggggtgttcgtctgttcgacgctgcagaaaccgcggaagatcgccgtctgaagcgtggcatgcgccgtcgcatcgcacgccgtaaagaacgtctgaactacctgcgtggtattttccaggccgatatcctcgcttttgatgacagctttttcattcgtatggatgagagcttcctccaggacgatgacaaacaggccaccgcgttctcctatcgtgaccagtctggtgcaatgcagacccgtgtggttaccgagaaagaggctgtcaaatacccgctgtttaacggtaagtctggttctggtgaaacgtacaccgacgaaagcgcctattacaaccagtatccaactatctaccacctgcgtcagcgtctgatcgataacccggctcaagctgacctgcgtctggtttacctggcgatgcatcacatcctgaaataccgcggtcatttcgtcaaccagggtcaaaccttcgatctgggtaacattaacattgcaggtaacctgactagcgcgctggacaagctggatgaagcgtctagcttcaagttcggcctggctgacgttgatgctgatcaagcgaacgccatcctgaagaataaacaatggagcgcgtctaagaaagcatatgagctgaacgcactgtttgaaattatccaagataccgtttaccgccgtgagaatgaaacccaggctgtaacctatgattctctgaccgtaaaacaacaggaaaaatggctggctgaaaaacagaaacaggtgaaagccttcctgacgggcatcgtgggtaacactatttctccgaaagatattttcgcaaacaaagactatgacaaaaagcagaacgaagacttcccagaaaagattaaatatagcaacgaaaactttgaggaacagatcggtgccctggaaaagtacctggatgagaccgaggtagcagccatcgtcgcgggtaaagacgtctacgaaagcctggttctgtctaacattctgaccaagagcaccctgtccggtagcatgattgaaaaatataacgttcatggtgctcagctgaaatccctgaaatctttttcccgtaaggtttccgcagaattctacgacaaactctttaacgtggttaaagacgagaaaggcaaacctcacatcggcgtgtatgcacagtacgttgacggtgttggtaacccggcgaaacgtctggcccgtgaagacttttatgatgcgctgaagaaagtgttcgaaagcgagttcaaaggcctgaccttcccggtgggtgagaaaggtatcgatttcactaagaccgatctgtccgctgatcgcgtggcgttcattcgtgaaatgaacgaagctatcaacctggaaaactacctgccgaagcagcgccaggctgacaacggcgaaatcccgtatcaggtacatgaacacgaactgattcgtattatcgaaaaccagaaacagtattacccgttcctcggcgacaaagtgcaggtcgcgtatgaagacgaatctggtcagacccaggtgcgtagcgagtataaaatccaagttctgttcaagtttcgtattccatattacgtgggtaccctggcgaaaaacagcggctgggttaacgaggatggtaaaaagctggtggctcgtaatgtggctgcgaaaaacagctgggtagttcgtaactccgatgagcgtgtaaccccgtggaacttcgaacaagttatcaacaaggaggcgagctccatcaacttcattgaacgcatgactaacttcgacacgtatctgccgaacgaaaaagttctgccgaaaaactctctcctgtaccaggaattcatcgtgaataacgaactgatcagctctggttattacctgaacggtcgcaaggagtactttctgcctgaacagcgtcaacgtattatcacccgtctcttcaaacgctatcgtaaggttagcgctaagcagatgctggacttcctcaaaaacgaatatcagattaaactggacgatgacccaaagaaactcttcggcctcgatacctttgttaaagttccgtcttataacggttccctgagcactgtcgttgatctgaccaaaaagatgggcattagcgaggatctgatcgctaactacccggagcgctttgaggaaattatcaaatggcagaccatcttcgaagacaaaaagatcctgaagaaaactatccgtgaagtaaaccacaacaaatggagcggcatgctcaccgcggagcaggtgaacaaactgtctaaacgccactacaccggttggggccgcctgtcccagaaactcctggatggcgtaaaaacttctcagggccgtactattatcgaatctctccgtgaaggcatttgtgataacttcatgcgtctgattgaagacgaaaaaatcgcagaatttattgcgaacgcgcaagtggcaggtgcgaaagacggtgttctggcatacgacctggtagaccagctgccgggctctccagcgatcaagaaaggtatctggcagagcctgcgtgttctgcaggaactggaacattatctgggccgtgatgccattggtaaagttgtaattgagatgagccgtgatgacgaatctagccgtcgcaccaaagcccgtaaacaacagctggaggaattctacaaaaagttcaaagaatctactggttctgatgtgaccgcagaactgaagcgtgagctgtccgaaaaagatgcgaaagaaatcgatgacgaaaaagtcttcctgtacttcctgcagaatggcaaatctatgtacagcggcgaccagctgtatctgtctcgtctggcagactatcaggttgatcacatcgttccgcagacctacatcaaggatgacagcctggacaacaaagtgctggtaactcagcgtgacaaccagaacaagggtggcgatacgccgagccaaaccgtggttactcgcatgaactcctactgggagatgctggctaaaaacggtcaggtttctccgcgtaaactggctaacctgaagaaaggcccaatcaccctgaaacagcgtgagggctttatcaaccgtcaactggttgaaaaccgtcagatcaccaaacacgttgcaaacatcctcatgaactattacactggcaccgataccctggtgctgacccctaaatccggtctgacctctcagctgcgtagcggtctgatctacgaactgaacccggcgttcgacgaggctaaagctctggaccgcggcaaggcgtaccaagtcgaacgctataccactgttaaactgcacgaccgttttgttaaaaaccgtaagctgaacgactatcatcacgctcatgatgcctacctgaacgcattcgtcgcacagtacgtttatcaggaacatccggagtggaaaaacgcttgggtttacggtaaatatccgcgtaacggtcaggcagactttggtaagtgggccacgcagcgtaagcaaaaaagcctccagctgctcagctctatggcgaacgatgtttggaacctggaagatccggacaccatggagaaaaccatcctgaaccgtgacgagacctttgagcagatgcgtcagacgctgtgctatcgtaacatcaacatcgttaagaaactggaaacccagaccggcaaattcggtgatgagtccgtttacaagaaaggcaataaggctgaccactactctctcggtctcaaacgtaaatatccaccgcagaagtacggtggcactaagggcgctatcagcgcggttaccgcgctggttaaagataactctggccgtgtcattcctgtaagcatctctgctagcgactacgattcttaccagaacgcgtctgacaagctggcttggctcctgatgcgtaagaaaaacatcgcggagatcctggttgcgtccctgccgaaatacaccaaatacgaactgccaagcggtgcactgcgtctgctcgcatcttatcaagaggctcagtccgctgttgaactgccgatgctgaacctgggtctgatggacgatgaggcgaaagttctcaatctgtatgatcagctcgcgcagtttattgcggacaacaaactcttcaccgacaagaaaattgccctcctgaaaggtgaaatgcgcgcagcgttcgatcgtctggaggaattcaaggataaacagaaagtcatcgatgaactcctgggtgttactaacggttccaaccagggtctgcaggctctgaactccatcggtctgggtacctctaaccaacgcctgaaatccggtaacaccatgacgaacggtgtaaccctcatcaatgagtccgttaccggtctgtacctgacccgtactacctacaacagcggcggaagcaaaagacctgccgctacaaagaaggccggccaggccaagaaaaagaagtaatgaggatccgcaggcctctgctagcttgactgactgagatacagcgtaccttcagctcacagacatgataagatacattgatgagtttggacaaaccacaactagaatgcagtgaaaaaaatgctttatttgtgaaatttgtgatgctattgctttatttgtaaccattataagctgcaataaacaagtt

SEQ ID NO: 661 - DNA, 4177 bp, synthetic construct
  source 1..4177: mol_type = other DNA
  misc_feature 1..4177: note = SV40-ARM148-Linker-n LEG190 -Linker-Nuc
atggccccaaagaagaagcggaaagtcgactataaagaccatgatggcgactataaagatcatgacattgattataaagacgatgatgacaagatgagcaaccccgagttcacacacgagtactggatgcggcacgccctgacactggcccgcagagccagagatgagggcgaagtgcctgtgggcgccgtgctggtcctgaacaaccaggtgatcggcgaaggctggaaccgggccattggactgcatgaccccaccgcccacgccgaaatcatggccctgagacagggcggactggtgctgcagaactaccggctgatcgacaccaccctgtacgtgacattcgagccatgtgtgatgtgtagcggcgctatggtccattctagaatcggcaccctggttttcggcgtgcggaacagcaagagaggagctgctggcagcctgatgaacgtgctgaattatcctggaatgaatcaccaggtgaagaccatcggcggcgtgctcgcccctgaatgcagcggcctgctgtgcgacttctacagaatgcctagacaagtgtttaaccagcagaaagccgagctgaagtccatcaacgactccggcgggtcttccggcggctctagtgggagtgagacgccaggaacgtctgaatctgctactcccgaatctagcggcggatccagtggcggtagtatgaaatatagcatcggcctggccatcggtattgcttctgttggttgggcagtcatcaacgaagacattgagcgcatcgaagacttcggtgttcgcatcttcgacgctgcggaaaacccgaaagatggcgcttctctgtccactccgcgccgtgaagcccgttccacccgcaaacgcctgcgtcgccgtcgccaccgtgttgaacgcatccgtcagctcattatccagaaaggcctcctgactcaggtccagatggaacagctgtacgattggaaagcggaggacctggacatttggctgattcgcgtaaacggtctggaacgcaaactcactgaccgcgaatttgcgcgtgttctgatccacctggctaaaaaccgtggcttcaaatctaaccgtaagtctgaactgaaagaaggcgacaatggtgtggttctgtccgcggttcaggaaaacaaacagctgatggaggaaaaaggttaccagaccatcgcagaaatgctcctgttcgacgaacgcttcgacggctgcaagcgcaacaaaggtggcgcgtactctcacgtggtagcgcgcagcgatctggaacacgaaattcgtctgattttccagaaacagcgtgaatacggccatgcattcgctaccatcgaaaacgaggaaggtttcgtttctatctgggcttctcaacgcccgttcgccaccaaagatgacatcgcgaagaaaatcggttattgcaccctggaaccaaaagagaagcgtaccccgaaatctacttacacgtttgaacgttttcgcgcgatcgataaactgaatcgtctgcgcatcctgagctccaccatcccgtcccgtccgctggtgcaggaggaacgcgatgacgttctgaacaccctgttctctaagaaagaagttaaatacaaagaactgcgtaaactcctgaaactgaaagatgcggagcgtttcaacgaaatctactatgatccgaacgaaagcaacgaaaaaaacgaaaaccgtacctttctcagcctggaaagccaacataaaattcgtaccattatcaaacaggttgagggtaaaaacattaacgatagctaccgtccgattgatctggatactttcgcctacgcgctgactgtattcaaggatgaccaggatattcgtgattacctgcaaaaccgctatgtgtcttccaacggtaagaaagttctgaacctggccaacctggagtacaaagaggaactgattgaggaactcctgcaactgtcctttgcgaaattcggccacctgtctctgaaagctctgaaaaacatcctgccgtacatggaacagggtatgccgtatcatcaggcgtgtgcggaagctggttacgaatttaaccagcgtgtgaacaaggaaaagcagtatctcctgcctgtcattccgactaaagacatcgcgaacccggtggttatccgtagcctgtctcaggtgcgtaaagttgtaaacggtatcattaagaaatacggctctccgagcgcgatctacatcgaactggcacgtgaaatgggccgtgtgtacaaagaacgtaaagaactggaaaaacagtacaacaaaaatcgtgagatcaacgaaggcgcaaagaaacacatcgttgaactgcacccgcagctgggtgacccacgcggccacgatattctgaaatacaaactgtggaaagagcaagatggccgttgcgcgtacagcttccagccgatctccatcgaacgtctgttccacatcggttatgcggaagtagatcacattatcccgtactcccgctcctttgacgattctaactctaacaaagtgctggtaattgctgccgaaaaccagaataaacagaaccgcactccgtacgaatggtttggtcataacgaaactaagtggcaggaattcacgtctttcgttaccactatgaaggtgtccaagaaaaagaaaggtctgctcctgaaaaaggatctggatgaggaacaggcggaggaattccgcagccgtcacctgaacgatacccgttacatcacccgttttatcaaaactttcatcgaagacaacctcctgttccgtaccgaagagagccgtaaacagtacgttcacactgttaacggcgcatacactagcctgatgcgtaaacgctggggtttcaacaaaaaccgccaggaaaacgatctgcaccatgccctggatgctgtgatcattgcggtctccctgccgttcaaacaccgtgtctctgcatattttaaacgccgtgaagagtacgctcacaaccagctgaaacgtgaaggtgaatttttccctgaaccgtggccaggctttatccacgaactggaaatccgtatgatgcaggacagcgaaaaaatgaaactggctattgaatctctggacctgaaaacctataacgaatccttcatcaatgaactgaaaccgatcttcgtgagccgtatgccgaagcgttctattaaaggccagatccatgaggaaaccctgaaacgtgttcgtggtctcaccgaaacgggctatatcctgacggtaaaaaagactcgcctggatcagatcccgttcgataagaacggcgattttccgatgtttggtaaagaaactgacatgaaaacctatgaagctattaaaaaccgctacctggaatttggcaagaacaaggaaaaagccttctccaccccgctgcataaaccggccaaaaaccctaataacgcgccgattatccgttccgttaaaatcgagaacaaaaccaaccgcgtagttatgctggatgacaaaaccgctgcagataacgccagcatcgtccgtaccgaggttttccgccacaaggaaaccggtaactattttctgaccccggtctatgtggctgatgctctgtccaaacgcgttccggatcgtctgatcacgcctaagaaaccgtactctgaatggaaacgtatcactgacgattacgaattcctgttcagcctgtacccgaacgacctgatccgtgtaaaaatgccgcgtgaaaaagaagccaagacccacgcgggcgagaaatgcctgtggcaggaaaacttcgtctacttcaaaggcgtagacagcgcggatgcacgtatcaaagtcgtggaccatatgaacagcttcgaggaccgtgtcggcacccagcgtctggttaccttcgaaaaatatcaggtcgacccgctgggcggtattaataaagttcacggtgaaaaacgttacggtttcagcggcggaagcaaaagacctgccgctacaaagaaggccggccaggccaagaaaaagaagtaatgaggatccgcaggcctctgctagcttgactgactgagatacagcgtaccttcagctcacagacatgataagatacattgatgagtttggacaaaccacaactagaatgcagtgaaaaaaatgctttatttgtgaaatttgtgatgctattgctttatttgtaaccattataagctgcaataaacaagtt

SEQ ID NO: 662 - DNA, 4117 bp, synthetic construct
  source 1..4117: mol_type = other DNA
  misc_feature 1..4117: note = SV40-ARM148-Linker-n LEG194 -Linker-Nuc
atggccccaaagaagaagcggaaagtcgactataaagaccatgatggcgactataaagatcatgacattgattataaagacgatgatgacaagatgagcaaccccgagttcacacacgagtactggatgcggcacgccctgacactggcccgcagagccagagatgagggcgaagtgcctgtgggcgccgtgctggtcctgaacaaccaggtgatcggcgaaggctggaaccgggccattggactgcatgaccccaccgcccacgccgaaatcatggccctgagacagggcggactggtgctgcagaactaccggctgatcgacaccaccctgtacgtgacattcgagccatgtgtgatgtgtagcggcgctatggtccattctagaatcggcaccctggttttcggcgtgcggaacagcaagagaggagctgctggcagcctgatgaacgtgctgaattatcctggaatgaatcaccaggtgaagaccatcggcggcgtgctcgcccctgaatgcagcggcctgctgtgcgacttctacagaatgcctagacaagtgtttaaccagcagaaagccgagctgaagtccatcaacgactccggcgggtcttccggcggctctagtgggagtgagacgccaggaacgtctgaatctgctactcccgaatctagcggcggatccagtggcggtagtatgtccaaccgtgtcccgtaccgcctggcactggcactgggtaccaacagcattggttggtgcctcctggacctgaacggcaacggcgatccgtgcggtgttcgccgtatgggtgttcgtatctttccggacggccgtgatcctaaaagcaaagaatctctggcggctgatcgtcgcctggcgcgctctatgcgtcgccgtcgcgatcgttatctgcgccgtcgcagcgcactgatgaacgcgctggtggcggcaggtctgatgccggctgatcaggcgggtcgtaaggcgctggaatctgaagatccgtacgaactgcgcgctcgcgcgctgactgaaccactgaccgcaggccaagttggtcgtgcgctgttccatctgaatcagcgccgtggtttcaaatctaaccgtaaagctgccggcgaggaaaacgaagccggtaaaatcaaagcgggtatctccgctctgaaagctgaaatcgaggcgagcggcgaaaccactctgggcgcatggctggcggcacgtcaccgtaaacgtgaaaccgtacgtgcccgtctcgatggcgctggtgcgaaggcgtcttatgaattctacccggaacgtagcctcgtgcacgacgaatttcaggcgatccgtactgcccaggcaccgcatcacccggatattactgccgaacagtgggatcgtattgaatccgttatctttcgtcagcgccctctgcgtccggtgcgtccgggcaaatgtaccctgttccctgaccaggagcgtgccccgtgggccctgccagtggctcaagaattccgcattctgaccgaggttggcaacctgaaactgtatcgtccgggtgaggaaccgcgcgaactctctgctggccagcatgcgcagctgtttgcaaaactgtgccgttccgcggatctgacttttgagaaaatccgtaaagagctgaaactggacccgggcctgaaggttaacctggaaggcgaaaaacgtgatcgcctcaaaggtgatgcggtcacttccgctctctctgcgaagaaacgctttggcccgaaatggaacgcactgactccggatgaccgccgtgacatcgttggtcgcctgatcgaagcggaagacgaggctgagctggcaggctggctggaatctgtacacggcctggcttccgagaacgcagctcatactgctgcaagcccgggcctgccggacggctactgccgtctctctgaaaaagcactggttgaactggttccgctgatgcgcgaacgcctcctgcgttacgatgaagccgtccgtgcgctggatctccatcactccgactttcgtccggacggtctcctggacgaactgccgtattacggcgaacctctcgaacgcttcattgcatttggttctggtgagccatccgatccaccggaactgcgtctgggtcgcttcccaaacccgactgtgcatattggtctgaacgaactgcgtaaactggttaaccgtattgtggaacgctggggtaagccggctgatattgtggtagaactggctcgcgacctgaaacgttctcgtgacgaacgtgacaccatccagcgtgaacaggcgcaaaaccagcgtaaaaacgaggaccgtttcgctaaaattaaagagctgggtatcgacccgcgcccggatagcatgctgcgtctgcgtctgtgggaggaactgccgaaagtaggtgttggtcacgtctgtgtttacactggcgaaccaatcggcattcgccgtctcctggagggtgatgttgatattgatcacatcctcccgttctctcgtactctgtctgacggtgctgataataaaatcgtatgcgttcgccgtgcgaaccgttttaaacgcgaccgctctccgtgggaagcactgggtgtgacggcggttgacggttatagctgggccgcgatcgcagagcgtgcggaggaactgccgaaaaacaaacgttggcgcttcctgccagatgcgatggaccgctttgaaggtgaacgcggcttcctggatcgtcaactcgttgaaacccgtcatctgtctcgtgttgcacgtcaatatctggcttctattgttgaactgaacaaagttcgtgtcgctccaggtaaactgaccgcaatgctgcgcgctcgttggggcctgaacaaaatcctgagcgatggtaacctgaaaaaccgctccgaccaccgtcatcacgcaatcgacgccgcggttctgggtgtgatcgatcagcgcctggttcaactggttgcacaagcagccgcgcgcgcagaagcgaatgaactggaacgcctgttcgatggtctcccggacccttttgacggtctggcggctatgtcttttggtgatcaggtgcgtgaaaaaatccgcggtatcactgtgagccatcgtgccgaacacggctggcagggccgtatgcataatgataccgcctatggcccggtggaagctgtaaacggcgttcataccgttgtaactcgcaagccgctgtccggtctgaccgcaaaagaattcccaaacattcgcgaccgtgttctggctaaagcgctggaagatcacgtggccgctgaggccgcggcaggccgtggcttcggtgacgcactgggcagcttcgaatggggtggccagccggtgcgccgtgtgcgtatgctggatgttctgggcaacccgattcctatccaggatccgtccggtaccgttttcaaggtatacaaaggcgactctaacgcatggtacgaaatcctgcgcgacccgcgtggccgttggaccggtaaaatcgtcagcaccttcgaagcataccgtctgcaccgtgaatggctggcagaaaccggtggcgactctggtcgtggtggcggtgtgttcctggattgggctgcgaagcgcgtggcgggtgaggccggcactccactgtttcgtctgttcaaaggcgacctcctggcactgggtgaagcaccagaccgtcgcattgtccgtgtcgtgaaattctctgaaggccaggtagcgctggcgctgcacctggaagccggtaacctgaaggcgcgtgatgcggataagggcgatccgtttaaataccagtattgcagcccagacagcctgcgtaaacaggcggctcgtccggcaggcgttgacctcctgggttacgtgcacgataaaggcccgctggaaagcggcggaagcaaaagacctgccgctacaaagaaggccggccaggccaagaaaaagaagtaatgaggatccgcaggcctctgctagcttgactgactgagatacagcgtaccttcagctcacagacatgataagatacattgatgagtttggacaaaccacaactagaatgcagtgaaaaaaatgctttatttgtgaaatttgtgatgctattgctttatttgtaaccattataagctgcaataaacaagtt

SEQ ID NO: 663 - DNA, 5005 bp, synthetic construct
  source 1..5005: mol_type = other DNA
  misc_feature 1..5005: note = SV40-ARM148-Linker-n LEG195 -Linker-Nuc
atggccccaaagaagaagcggaaagtcgactataaagaccatgatggcgactataaagatcatgacattgattataaagacgatgatgacaagatgagcaaccccgagttcacacacgagtactggatgcggcacgccctgacactggcccgcagagccagagatgagggcgaagtgcctgtgggcgccgtgctggtcctgaacaaccaggtgatcggcgaaggctggaaccgggccattggactgcatgaccccaccgcccacgccgaaatcatggccctgagacagggcggactggtgctgcagaactaccggctgatcgacaccaccctgtacgtgacattcgagccatgtgtgatgtgtagcggcgctatggtccattctagaatcggcaccctggttttcggcgtgcggaacagcaagagaggagctgctggcagcctgatgaacgtgctgaattatcctggaatgaatcaccaggtgaagaccatcggcggcgtgctcgcccctgaatgcagcggcctgctgtgcgacttctacagaatgcctagacaagtgtttaaccagcagaaagccgagctgaagtccatcaacgactccggcgggtcttccggcggctctagtgggagtgagacgccaggaacgtctgaatctgctactcccgaatctagcggcggatccagtggcggtagtatgcgcaaaaaccaggaaccgtacaatattggcctggcaatcggtacctctagcatcggctggagcatcatgaatgacaatttcgacctgatgcgcgttaaaggcaagaaaggtattggtgtacgtctgtacaacgaaggccaatccgcggcagaacgtcgcatgcaccgcaccgctcgtcgccgttacggccgtcgcaaatggcgtctgcgcctcctggaagattttttcgacgagcacatggcggaggtcgacgatactttctttgcgcgcctgaaagactcctctatctctccgaaggacgataagaaataccgtaaatccctcctgttcccgaagtccaaaggtctgacctaccaagatgacggcgaattctataagaaatacccgacgatgtaccacctgcgttatgcactgatgacggaacaccgcaaatttgacctccgtgaaatctacctggctttccatcacatggtgaaatatcgcggcaactttctgtacgacacctccgtcgattcttttgaggccaaaaacctggacatcaaaggtaaattcgatgaaattaacgacctcctgagctcttacaccgatttctatgtggataacagcaacgcggccctggtggaaagcatcctcctggaaaagaatactacccgcaaagacaaagcgaagaaaatcgccaaactcctgcacgttgaagacaaagaaaaagtcaaaaacaaaaaggcgaaagacctggctacccaaatttccaacgcagtactgggtctgaaatgtaacttccacctgatcttcgaactgcagcaaaaatactccttcgatctgtgcagcgaaaaaactgaggaaaacatcgctaacctgagcgaagtactggatgaaaaccagaagatgctgctcatgattctgaaagaaatccaggaccaggtcatgctgaacgcgttcgtgccgtccggtatgtctctgtccgaagccatgatgcagaaatatgacgcatacggtgaacaactgaaaatctaccacgaactggagcattctgtttctgatgactctgcggctgagctgcgtggcgcgtattgtgattacaacgataacatcgctaaacgcgacgaattttacaataaactgaaaaagatcctgtctgatatggataaggaaaatgttgaacaagacgttctggaatcttgcggcaaactgaagaaactgatcgatgaaaacaagctcttcatccgtcagcgcaccgcagctaacggcgtgctgccgcatcagctgcatcaaatcgagatgcgtaaaatcattgataaccagaaagaatattacccgtggctggctgaacctaacccgaatgaaaaacgtcgcgtgtatagcaaatacaaggtggaggaactcattgcattccgtatcccgtactatgttggtccgctggtagatccgaataacgcagacaaaaacaaggaagcccgcttctcctggatggtgcgtaagaaagacggtgaaatcactccatggaattttgatgacaaagtcgatcgtgcggaaagcgctaataacttcatcaaacgcatgaagagcaaagacacttacctgctcggtgaagatgtagttccgaaagaatctatgctgtaccagaagtacgaagttctgaacgaactgaataacctgcgtatcaatgattccggtctgtctgactccttcgaagacgttaaactgaaacaggctatctacaacgatctgtttaagaaacagaaaatcgttaaaattaccgacctgcagaattatctggtccagaaccacaaatatctggttaaaccaaaaatttctggtctggccgatgagaaccgtttcctgtcttccctgtctacctactccgacctgaagaccatcttcggcgacaaagtggatgaccgcacctattttaacgatttcgaaaaaatggttgagtattccactgtttttgaggacggccacgtttacaaacagaaactggatgaattcacctggctgaccaaagaggaaaaagacaaaatcggtaagaaacgctaccgtggttggggcaaactgtccaagaaactcctgactggcctgcgtgacaagaataaccacaccattatggacaacctctgggagactaaccgtaacttcatgcagatccagaccgccgatgaattcccgaaacagatttctgaagagaacgaacgccacctgaaaggctccgtaagcgacgctattaatgatatgtatacctctccagctaacaagaaagctatccgccaggttctgcgcgtagttgacgatatccagaaagccatgggctatgctccgtcttccatcagcctggaatttgcccgtgaagacggcccgtctgttcgtaccgtctcccgcgctaaccgtatgaagtccatctatgaaaaatacgcctccgaagtgtctgaggaagttatgaaggacctcgacggcgttattaaagataagaaaggtctgaacgatcgtctgtacctgtattttgagcagcaaggtaaggacatgtacagcggccacccgctggacttcgacaaggttatctctggccaggaatacgacattgatcatatcctgccgcaagcggtaatcaaagacgattctctggacaaccgcgtgctgacgaccaaagcactgaataacgacgttaaatctaaaggtgtgccatgccgcatgtttaacggtatgcacagcttctggaaaaacctgtatgataaaggcttcatctctcgccgtaaattcaataacctgactaccaacccggaaaacatcgacaaatacaaaatgaaaggttttgttaaccgtcaactggtcgaaacccgtcagattatcaaactggtagcgaacgttctgaacgataaataccagaacgatgacgttgacatcattgaagtacgtgcggaactgactcacgacgtgcgtaaacacttcaaattttacaaaaaccgcaacgtaaacgattaccaccatgcattcgacgcttatctgactaacttcgtgggtcagtacctgttcaagaaatacccgaacctgcgtcctctgttcgactataatgatttcatgaaagtgtctgacaatgtttttaaacagctgcgtggtaataacttcctcggcgaattcctgaacaaaacgggtgacattatcagcactgacggtaactttgtgctgaataaagaggaaatgatcaacaaactgaataaagcgtatgctttcaagaaaatcctggttaccaaagaagtcgtgcagcgtaccggcgccatgttcgatgaaactgtatatagcgctaaatctggtaagacgctgatcaaactgaagaaagaccgtgacacttccatctacggcggtcatagcggcaacaaggacgcgtacatggttatcgtatacacgggcaaaggttataaagtgatcggtatcccggttcgctatgcagaacgcctggactccctgcgtaagaacgacgtcgatggcttcaacgatatgctgaaccgcctgatcgaatccaaattttccaaaaagagcaagaacaagcagttccgtattgttattgataaagttctgtacaaccaactgatccaggatggtaacctcctgttcaccctgggcagcgcggcttatcaacataacttccgtcagctgttcctggacaagaaagctctggaaatcctggataaagtggcaacgccgaaaccgaccgatgacgatctgatcatggtttatgatcagattctggaacgtgtagacaaatatttcgagctgtacgacaacggcggttgtcgtgaagcgctgcataaaggccgcgaactgttctgtaagctgccagtgtccaaacgtaacgaaaaagacgttaccaaacgtgatatgatctacaccattctggacggtctgcacgcaaacggcaaaactgtatcttgcctggaaattggcaaaggcggtgccttcggtaaatttcagaaacagaacggtatcaacctcagcgaaaacgctaaactcatttatcagtctccgaccggcctcttcgagcgtgtggtctacctgaaagacctgagcggcggaagcaaaagacctgccgctacaaagaaggccggccaggccaagaaaaagaagtaatgaggatccgcaggcctctgctagcttgactgactgagatacagcgtaccttcagctcacagacatgataagatacattgatgagtttggacaaaccacaactagaatgcagtgaaaaaaatgctttatttgtgaaatttgtgatgctattgctttatttgtaaccattataagctgcaataaacaagtt

SEQ ID NO: 664 - DNA, 4204 bp, synthetic construct
  source 1..4204: mol_type = other DNA
  misc_feature 1..4204: note = SV40-ARM148-Linker-n LEG200 -Linker-Nuc
atggccccaaagaagaagcggaaagtcgactataaagaccatgatggcgactataaagatcatgacattgattataaagacgatgatgacaagatgagcaaccccgagttcacacacgagtactggatgcggcacgccctgacactggcccgcagagccagagatgagggcgaagtgcctgtgggcgccgtgctggtcctgaacaaccaggtgatcggcgaaggctggaaccgggccattggactgcatgaccccaccgcccacgccgaaatcatggccctgagacagggcggactggtgctgcagaactaccggctgatcgacaccaccctgtacgtgacattcgagccatgtgtgatgtgtagcggcgctatggtccattctagaatcggcaccctggttttcggcgtgcggaacagcaagagaggagctgctggcagcctgatgaacgtgctgaattatcctggaatgaatcaccaggtgaagaccatcggcggcgtgctcgcccctgaatgcagcggcctgctgtgcgacttctacagaatgcctagacaagtgtttaaccagcagaaagccgagctgaagtccatcaacgactccggcgggtcttccggcggctctagtgggagtgagacgccaggaacgtctgaatctgctactcccgaatctagcggcggatccagtggcggtagtatgccgtttcgtcagccggtatcttacgcattcgcgatgggtacgaactccatcggctggtgcgtgttccgtctgagcgctgcaggtcatccagtcgctattgcggacgccggcgtccgcatttactctgatggccgtgacccgcagtccaaaacctccctggctgttgctcgccgtgaagcaaaagccgcggctcgtcgccgtgatcgtaccaaacgccgtcagaaagcaactctgcgtactctggcggaatacggtctgatgccgggcggtaaagatgaacgtgaacgcctcctgcgcgaaacggcagattccgctgaccgtaacgcgccagcaaatgacccgctgaacctgcgcgcgcgcgcgctgaccgaaaaactgccactgcaccatattggccgtgcgctgtttcacctgggccagcgtcgcggctttaaaagcaaccgtaaaaccgaccgtcgcgacaacgacaaaggcaaaattgccatcggtatcgatcgcctgcgcgacgcgatccgtgaagctaaggcagaaacgctgggtgttttcctggcctcccgtcgcgcccaaggtctgcacgtgcgtctgcgcgcaggtagctctgtgattctggatgacggctatgacttttatcctgttcgttccctcctggaagaggaatttcgtcatatttgggatgctcaggccgtccactatcctgacgtcctgaccgaagcccgtggtgagcatctgtttaaagttattttccatcagcgccctctgaaaaagccgcgcatcggttcttgtaccttcaacccgctggaacagcgcctggcgaaagcacacccgctgttccaagctttccgtctgtataaagaagttaacgaactggaggtggtagcgccggacctgagccagcgcaaactgacgctggacgaacgtgatgccctggttctgaaactgcgtggcgcaaaaaccgcaaaatataaaactctgcgtaaggatctgaagctgaccccggatatgcgttttaacaaagaatctgaaaaccgcgtagatatggcgggtgacgaagtgaccgcagcgctgtccgccaagggtctgttcggtccgcgttggaataccctgtctatggattctcagtggaaagtgatcgagcgtatccaggaagaggaaaacccttttgttctgcatcagtggctggtggaaacgcacggcctgtccgatgacgcagccgaagctgtggcggcatgccacctgccggaaggctacggccgtctgggccacactgcactgagcactatgctggaggaactgcgtgctgacgtgattccggaagcgaaagccgcagaacgtgcgggttacaaccattcttatttcggcaccggtgagatcttcgatgaactcccgaaatatcaggaagttgtggcccgttctatcccgccaggcaccggtgatctggaagatgaatatgacgttcgtaagggtcgtattactaacccaactgtacacatcggtctgaatcagctgcagcgcctggttaacggtctgattcgccgtttcggtaaaccggcagagatcgctgttgaactggcgcgcgatctgaaaaccaacgagaaaaagaaaaccgagatcaaccgccgtatcggtgaaaacacccgtgctgcacgccagcgcagcgaaaaaatcgcggaactgcgtaaagacactccagcgctggtagataacggttacaaccgtctgctcctgaaactgtgggaggaactgaacccggcaaaacctgaagatcgctgctgtatctatactggcaagccgattagcatcagcatgctgttctccggcgcggtggacgttgatcacatcctgccatattcccgtactctggatgacggtcagggtaacaaactcctgtgcctgaaagaggcgaatcgtgttaaacgcaaccgcgcaccgtccgaagtaaccgaatgggcgaaccattatgacgaaatcctggagcgcgctaaccgcctgcctaaaccgaaacgttggcgttttgcacgtgacgttatggccgactttgatgctgactctggtttcctggatcgtcagctgaccgatactcagtacctgagccgcctggcacgtgaatatctgtgctccctgtacccggaaaaacacgaacagtggcgtgtacgcgtgatcccgggccgcatgaccgaaatgctgcgccgtcactggggtctgaacaccctgctcccggatcacaactactctgacgctaaaaaccgtaatgaccatcgtcatcacgccattgacgctgcggtagtgggtgttaccacgcgttctatgctgcagcgtatcagcactgaagcggctcgccgtgaggaacaggagctggaagatgttgtaaagggtattcctgttccgtgggagcacttccgcgatgacctgcaacaggcactgaataacattgttgtgtcccataaaccggaccacggcaccgttggcctggatgacaaaggtaaatggcaaactgcaggcaaactgcacaacgacaccgcttacggtctgactggtgaagttgatgcacgtggtaacaccattgtggttcgtcgcaaaatgctcctgtctctgactgacaaagatattccggccattcgcgatgacgagctgcgcgcgcgtctgtatagcgcagccggtggcctgtccggtaaagaactgcaacaggccctgctcgacttcgctcgtaacgatccaaaatatcgtggcatccgccgtgtacgtgtgaccgaaactctggcggtcatcccgatccgcgacaaagatggcaacgtctacaaaggctacaaaggcgacgctaactaccgttacgatgtctgggagatgaaggacggtaagtggcaggccgaagttatttctatgttcgacgcgcatcagaaaggttgggaaagccctgttcgtaaagcaaacccgaccgcccgcaaagttctgagcctgcagcaaaacgatatggtcgcgtacgagcatccatctgacggttataccatcgcacgtgttgtcaaattcgcctcctctggtcagatcgtgttcgcgcgcaataacgagggcggttccctgaaggctcgtgatgcgaaccgcgacgatcctttcaaatatttctctaaaaccgccaacggtctgcgtgaaattaaagcgcgtcagatccgtatcgacgaaaccggccgcgtttacgacccgggtccgcgcgaccgtgaaagccgtatgattggtaaccagaagctgaagacgatcgccatcagcggcggaagcaaaagacctgccgctacaaagaaggccggccaggccaagaaaaagaagtaatgaggatccgcaggcctctgctagcttgactgactgagatacagcgtaccttcagctcacagacatgataagatacattgatgagtttggacaaaccacaactagaatgcagtgaaaaaaatgctttatttgtgaaatttgtgatgctattgctttatttgtaaccattataagctgcaataaacaagtt

SEQ ID NO: 665 - DNA, 4174 bp, synthetic construct
  source 1..4174: mol_type = other DNA
  misc_feature 1..4174: note = SV40-ARM148-Linker-n LEG203 -Linker-Nuc
atggccccaaagaagaagcggaaagtcgactataaagaccatgatggcgactataaagatcatgacattgattataaagacgatgatgacaagatgagcaaccccgagttcacacacgagtactggatgcggcacgccctgacactggcccgcagagccagagatgagggcgaagtgcctgtgggcgccgtgctggtcctgaacaaccaggtgatcggcgaaggctggaaccgggccattggactgcatgaccccaccgcccacgccgaaatcatggccctgagacagggcggactggtgctgcagaactaccggctgatcgacaccaccctgtacgtgacattcgagccatgtgtgatgtgtagcggcgctatggtccattctagaatcggcaccctggttttcggcgtgcggaacagcaagagaggagctgctggcagcctgatgaacgtgctgaattatcctggaatgaatcaccaggtgaagaccatcggcggcgtgctcgcccctgaatgcagcggcctgctgtgcgacttctacagaatgcctagacaagtgtttaaccagcagaaagccgagctgaagtccatcaacgactccggcgggtcttccggcggctctagtgggagtgagacgccaggaacgtctgaatctgctactcccgaatctagcggcggatccagtggcggtagtatgaaatacagcatcggcctggctatcggcattgcgagcgttggttgggcggttatcaacgaagacctgggccgtatcgaaaacatgggtgttcgtatcttcgacgctgcagaacatccgaaagacggtagctccctgtccactccgcgtcgcgaagcacgttccgcgcgtaagcgtctccgccgtcgccgtcatcgtgttgaacgcacccgctatttcatgatccagaaaggcctcctgactcaggtgcagatggaacagctgtatgactggaaacatggcgacctggacatttggctgatccgtgttaacgcactcgaacgtaaactgaccaatcgtgagttcgcacgtgttctgatccatcacactaaaaatcgtggtttcaaatctaatcgtaagtccgaactgaaggaaggcgacaatggtgtagtgctgtccgcggttcaagaaaacaagcgcctgatggaggaaaagggttatcaaaccatcgctgaaatgctgctcctggacaccaaattcaaaggcctgaaacgtaacaaaggcggtgactatagccacgtggtagcgcgttccgaactggaacatgaaatccgtctcgtattcgcaaagcagcgcgaattcggtcaccgtttcgctagcgtggaaaacgaggaaggttatatcgcgatctggtctagccagcgtccgttcgctacgaaagatgacatctctaagaaaattggctattgcaccctggagccgaaagagcgccgtgcacctaaatctacgtacaccttcgaacgcttccgtgcgctggacaagctggcgcgcctgcgtatcctgtcctctactaaggagaaccgtgcgctgaccgatgacgaacgtgaactgattctgaacagcctgttctccaagaaagagatgaagtacaaagaactgcgtaagctcctgaagctgcaggacaccgaccgcttcaacgaaatcttctacgacccggaagcaactgccgacaaaaacgagaaccgtactttcctgtctctggaatctcagtataaaatccgttctattatccaacaggttgaaggcaagaaaatcaacgattcctaccgtccgatcgacttcgatactatcgcctatgctctgacggttttcaaagatgaccaggacatccgtgactatctcctgaacgactacgtagaatctaacggtaaacgtactaccaacctggccaaccgcgtatacaaagaggaagtaattgaggaactcctgcagctgagcttcgcaaaattcggtcacctgagcctgaaagccctgaaaaacatcctggtacatatggaacagggtctgccttactataaagcctgtgaggaagcaggttatcagtttaacagcaaccagaacaaagataaacagcgtatcctcccggtgatcccggccaaagaaattgcgaacccggttgtagttcgtagcctcagccaggtgcgtaaagttgtaaacggcattatcaagaaatacaatatccctagcgcgatgtacatcgaactcgctcgtgacatgggccgcgtgtacaaagaacgtcgcgacatcgaaaaacaatacgataaaaaccgtcagatcaatgaggcagcgaaagaacgtattatcgaatactccgaaggccgttttacgccgaaagcacacgacatcctcaaatacaaactgtggcaggaacagggtggccgttgcgcctactcttttgcgcctatcccgattgaatctctgttcaacatcggctatgtagaagtggatcacattatcccttactcccgtagctttgacgattccaacaataacaaagtcctggtcctgagcgcagaaaaccaaaacaagcgtaaccagaccccgtttgaatacttcggtcacgatgtcgtaaagtgggagcagtttaaatctttcgtgaccactctgaaagtggcgaaacgtaagaaaatgctgctcctgaaacagaacttcgacgagcagcaagcggaggaattccgctcccgtaacctgaacgatacgcgttatatcacccgttttatcaaaaacttcatcgaagataacctgcagtttcgtgaagaggaaggcaataaacagcacgtgtttaccctgaacggtgcgtatacttctctcatgcgcaagcgttggggtttcaacaaaaatcgccgtgaaaacgatctgcatcacgcactggacgcggtactgatcgcggtgtcttggccgttcaaacaccaagtgagcgcttacttcaaccgccgtgaggaatatgcgcgtaaccagctgaaacgtgagggcgaatacttcccggaaccatggccgggcttcatccacgaactggaaatccgcatgatgcaggatgaagataaaatgaaactggcgctggaaagcctggatctgaaaacgtatgatgacgattttatcaaccgtgtgaaaccgatcttcgtttcccgcatgcctaaacgctccattaagggccaaatccacgaagcaactctgaaacgtgtgcgcggtaacaccgaagacggttatatccgcactgttaagaaagtgcgtctggaccagatcccgttcgaaaaaaacggcaattttccaatgtatggcaaagaaactgacctgaagacttatagcgctatcaagaaacgttttctggaatatggtgatcgtaaaaaggcattcgccaccccgctgtataaaccggcgaaagacccgtctaaagcgccgattatccgtagcgtgaagatcgaagagaaagcgaatcgtgtagttcacctggatgaaaaaacggtggcagataacgccagcatcgcaaaaactgaggtgttccgtcaccgtaaaaccggccagtattacctgactcctatctatgtagcggatgttgtgaacggtattatcccggaccgtctgatttccactaagaaaccatattccgagtggcgccgtattactgatgaatacgagttcctcttctctctgtacccgaacgacctgatccgtatcaaaatgccaaaagaaaaggagactaaaaactttatgaaagagacccacatttggcaggagggtttcatgtactatcgcggtgtgcactccggctctgccggtgttcgtatgattaaccatatgaacagcttcgaggacgaaatcggtgttcagaagctggaactgttcgagaaataccaagttgacccgctgggtggcattactaaggtgcacggtgaaaaacgttacggtatcagcggcggaagcaaaagacctgccgctacaaagaaggccggccaggccaagaaaaagaagtaatgaggatccgcaggcctctgctagcttgactgactgagatacagcgtaccttcagctcacagacatgataagatacattgatgagtttggacaaaccacaactagaatgcagtgaaaaaaatgctttatttgtgaaatttgtgatgctattgctttatttgtaaccattataagctgcaataaacaagtt

SEQ ID NO: 666 - DNA, 4159 bp, synthetic construct
  source 1..4159: mol_type = other DNA
  misc_feature 1..4159: note = SV40-ARM148-Linker-n LEG207 -Linker-Nuc
atggccccaaagaagaagcggaaagtcgactataaagaccatgatggcgactataaagatcatgacattgattataaagacgatgatgacaagatgagcaaccccgagttcacacacgagtactggatgcggcacgccctgacactggcccgcagagccagagatgagggcgaagtgcctgtgggcgccgtgctggtcctgaacaaccaggtgatcggcgaaggctggaaccgggccattggactgcatgaccccaccgcccacgccgaaatcatggccctgagacagggcggactggtgctgcagaactaccggctgatcgacaccaccctgtacgtgacattcgagccatgtgtgatgtgtagcggcgctatggtccattctagaatcggcaccctggttttcggcgtgcggaacagcaagagaggagctgctggcagcctgatgaacgtgctgaattatcctggaatgaatcaccaggtgaagaccatcggcggcgtgctcgcccctgaatgcagcggcctgctgtgcgacttctacagaatgcctagacaagtgtttaaccagcagaaagccgagctgaagtccatcaacgactccggcgggtcttccggcggctctagtgggagtgagacgccaggaacgtctgaatctgctactcccgaatctagcggcggatccagtggcggtagtatgaaaaagctggactaccgtatcggtctcgcaatcggtaccaactccatcggctggggcattatcgaactgtcttggaaccgcgataaggaacagtatgagaaagtgcgtatcgttgataaaggtattcgtatgttcgacaaagccgaaatcccgaagaccggtgcatctctggccgaaccgcgccgtatcgcacgttcttcccgtcgccgtctgaaccgcaaatctcagcgtaagaaagacatccgtaacctcctgatccagcacgaagtgattaaccagaaagagctggatagcctgtacccgctgtctaagaaatctattgatatttgggatatccgtctggatggtctggatcgtctcctgaaccgtctggaatgggcgcgcctcctgatccacctggctcagcgccgtggcttcaaaagcaatcgcaaatctgagctgaaggacgaggaaaccggcaaagtgctgtctagcatccaggctaacgaaaaacgtctgtccctctaccgtaccgtaggcgaaatgtggatgaaggacgcggacttcagcaagtacgacaaacgccgtaacagcccgaacgaatacgttttctccgtgaaccgtgtcgacctcgagaaagagatcgtcactctgtttgaggctcagcgtaacttccagtcctcttatgcgagcgtagatctgcaggaaacctatctgcagatctgggcgcatcagctgccgttcgcgtccggtaacgcgatcctgaacaaagtgggctactgtagcctcctgaagggtaaagaaaaacgtattccgaaagctacctacaccttccagtacttttctgctctggaccaaatcaaccgtacccgcctgggccctgaatttcaacgcgtgactaccgaacagcgtaacctgatcctggacaaggtgttccagcgtactgactattacaagaaaaagaccatcccggaggtcacctattacgatatccgcaaatggctggcactggatgaaaccatccagtttaagggtctgatttatgatccgaacgaagagctcaagaaaatcgagaagaaaccgttcatcaacctgaaaccgttttacgaaatcaagaaaatcgtagcgaactacactgaaaaaaccaacgaagcgttctctaccctggactatgacactgtcgcgtatgcgctcaccgtctataaaaccgacaaagacatccgttcttatctgaaatccccgcacaacctgtctaagcgttgctacgacgatcagctgatcgaggaactcctgagcctgagctacaccaaattcggtcacctgtccctgaaagccatcaactacgtgctcccgattatgcaggaaggtcgtacttacaaagaggcggccgaccagctgggtttcgacaccacgcacctgaagaaagaaaaacgctccaaattcctgcctccgatcagcgacgaaattaccaatccgatcgtaaagcgcgccctcactcaagctcgtaaagtcgtgaacgcaattatccgccgttatggcagcccgcattccgtgcacatcgaactggcgcgtgaactgtccaaatctcgtgaggaacgcaacaaaatcaaggctgcgcaggatgaaaattacaaaaagaacaaaggcgcaatcagcatcctgagcgaacatggtatcctggatccgaccggctacgacatcgttcgttacaagctgtggaaagaacagggtgagcgttgcgcttactctctgaagaccatccctccggacacctttttcaacgaactgcgcaaagaacgtaacggctctccaatcctggaagttgatcacattctgccatactcccagtctttcatcgactcttatgataacaaagtactggtttattctgacgagaatcgtaagaaaggtaaccagatcccatatttttacttcctggaaacgaacaaagattgggattccttcgaaaaatacgtacgtagcaacaaactgttctccaaaaagaaatctggctacctcctgaagaaagcgtatctgccgcgcgagtccgagctgatcaaggaacgccacctgaacgatacccgctacgcatctagcttcctgaaaaatttcattgaacagaacctgcagtttaaagaaatcgaaggtaacccgcgtaagaaacatgtccagaccgtcaacggcattatcaccgcccatctgcgcaaacgttggggtctggaaaaagaccgccaggaaacctatctgcatcacgcaatggatgcaattatcgttgcgtgcaccgaccatcacatggtgactaaagtgaccgagtattaccagaccaaagaatccaacaaatctgtcaagaaaccatactttccgctgccgtgggaaggttttcgtgacgaactcctgtcccacctggcaagccagccaattgcgaagaaaatcagcgaagagctcaaagcgggcttccaaccgagcaactatattctggtatctcgcatgccgaagcgttccattacgggcgcggcacacgaccagaccatcatgaagaaaggtggcatcgataagaaaggtaaaaccattatcattaagcgcctccagctgaaagacatcaaatttgacgaaaacggtgactttaaaatggttggtaaagagcaggacattgcaacttatgaagctattcgtcagcgttatctgaaacacggcaagaactccaaaaaggcgttcgaaaccccactgtacaagccgtccaagaaaggcaaaggtaacctgattaccaaagttaaagtagaagtgcagaccaaatctttcgtgcgtgaagtaaacggcggtgttgcgcagaacggcgatctgatccgcatcgacctgtttgaaaaggattataaatattacatggttcctatctatgtactcgacaccgtctgctctgaactgccaaacaaagtagtgactagctccaagggctacgagcagtggctgaccctggataacagctttatgtttaaattcagcctctacccgtacgatctcgtgcgtctgattaaaggtgacgaagatcgtttcctgtacttcagcactctggacatcgacagcgaccgtctgatcttcaaagatgtaaacaagccgagcaagaaaaacgaataccgttattctctgaaaactattgaggatctggaaaaatacgatgtcggcgtcctgggcgacctgagcctggttcgccaggaagtgcgccgtaagttccagagcggcggaagcaaaagacctgccgctacaaagaaggccggccaggccaagaaaaagaagtaatgaggatccgcaggcctctgctagcttgactgactgagatacagcgtaccttcagctcacagacatgataagatacattgatgagtttggacaaaccacaactagaatgcagtgaaaaaaatgctttatttgtgaaatttgtgatgctattgctttatttgtaaccattataagctgcaataaacaagtt

SEQ ID NO: 667 - DNA, 25 bp, Homo sapiens
  source 1..25: mol_type = other DNA
  misc_feature 1..25: note = Hurler LPG10165 target
agcagctctaggccgaagtgtcgca

SEQ ID NO: 668 - DNA, 25 bp, Homo sapiens
  source 1..25: mol_type = other DNA
  misc_feature 1..25: note = Hurler LPG10167 target
ggagcagctctaggccgaagtgtcg

SEQ ID NO: 669 - DNA, 25 bp, Homo sapiens
  source 1..25: mol_type = other DNA
  misc_feature 1..25: note = Hurler LPG10168 target
ggagcagctctaggccgaagtgtcg

SEQ ID NO: 670 - DNA, 25 bp, Homo sapiens
  source 1..25: mol_type = other DNA
  misc_feature 1..25: note = Hurler LPG10207 target
ggagcagctctaggccgaagtgtcg

SEQ ID NO: 671 - DNA, 25 bp, Homo sapiens
  source 1..25: mol_type = other DNA
  misc_feature 1..25: note = Hurler LPG10171 target
agcagctctaggccgaagtgtcgca

SEQ ID NO: 672 - DNA, 25 bp, Homo sapiens
  source 1..25: mol_type = other DNA
  misc_feature 1..25: note = Hurler LPG10186 target
ggagcagctctaggccgaagtgtcg

SEQ ID NO: 673 - DNA, 25 bp, Homo sapiens
  source 1..25: mol_type = other DNA
  misc_feature 1..25: note = Hurler LPG10190 target
ggagcagctctaggccgaagtgtcg

SEQ ID NO: 674 - DNA, 25 bp, Homo sapiens
  source 1..25: mol_type = other DNA
  misc_feature 1..25: note = Hurler LPG10194 target
agctctaggccgaagtgtcgcaggc

SEQ ID NO: 675 - DNA, 25 bp, Homo sapiens
  source 1..25: mol_type = other DNA
  misc_feature 1..25: note = Hurler LPG10195 target
gctctaggccgaagtgtcgcaggcc

SEQ ID NO: 676 - DNA, 25 bp, Homo sapiens
  source 1..25: mol_type = other DNA
  misc_feature 1..25: note = Hurler LPG10200 target
gagcagctctaggccgaagtgtcgc

SEQ ID NO: 677 - DNA, 25 bp, Homo sapiens
  source 1..25: mol_type = other DNA
  misc_feature 1..25: note = Hurler LPG10203 target
agcagctctaggccgaagtgtcgca

SEQ ID NO: 678 - DNA, 15 bp, synthetic construct
  source 1..15: mol_type = other DNA
  misc_feature 1..15: note = Hurler Forward Amplification Primer
gactccttcaccaag

SEQ ID NO: 679 - DNA, 14 bp, synthetic construct
  source 1..14: mol_type = other DNA
  misc_feature 1..14: note = Hurler Reverse Amplification Primer
gtagatcagcaccg

SEQ ID NO: 680 - DNA, 14 bp, synthetic construct
  source 1..14: mol_type = other DNA
  misc_feature 1..14: note = Hurler Wild Type Probe
ctctgggccgaagt

SEQ ID NO: 681 - DNA, 14 bp, synthetic construct
  source 1..14: mol_type = other DNA
  misc_feature 1..14: note = Hurler W402X Probe
ctctaggccgaagt

SEQ ID NO: 682 - DNA, 13 bp, synthetic construct
  source 1..13: mol_type = other DNA
  misc_feature 1..13: note = Hurler Forward primer binding site
acttcctccagcc

SEQ ID NO: 683 - DNA, 13 bp, synthetic construct
  source 1..13: mol_type = other DNA
  misc_feature 1..13: note = Hurler Reverse primer binding site
gaaccccggctta

SEQ ID NO: 684 - DNA, 25 bp, Homo sapiens
  source 1..25: mol_type = other DNA
  misc_feature 1..25: note = LPG10165 5-prime Genome Target Sequence FRDA
tagctagagcagcaggggccctggc

SEQ ID NO: 685 - DNA, 25 bp, Homo sapiens
  source 1..25: mol_type = other DNA
  misc_feature 1..25: note = LPG10165 5-prime Genome Target Sequence FRDA
aaagcagaagccagtgtaaatgcaa

SEQ ID NO: 686 - DNA, 25 bp, Homo sapiens
  source 1..25: mol_type = other DNA
  misc_feature 1..25: note = LPG10165 3-prime Genome Target Sequence FRDA
gtagccacgggggctggtgaccacc

SEQ ID NO: 687 - DNA, 25 bp, Homo sapiens
  source 1..25: mol_type = other DNA
  misc_feature 1..25: note = LPG10165 3-prime Genome Target Sequence FRDA
attcttggttctgctgagtagccag

SEQ ID NO: 688 - DNA, 25 bp, Homo sapiens
  source 1..25: mol_type = other DNA
  misc_feature 1..25: note = LPG10166 5-prime Genome Target Sequence FRDA
agcatggagacagccgcacacccct

SEQ ID NO: 689 - DNA, 25 bp, Homo sapiens
  source 1..25: mol_type = other DNA
  misc_feature 1..25: note = LPG10166 5-prime Genome Target Sequence FRDA
caggacaaaatgtccccttttcctt

SEQ ID NO: 690 - DNA, 25 bp, Homo sapiens
  source 1..25: mol_type = other DNA
  misc_feature 1..25: note = LPG10166 3-prime Genome Target Sequence FRDA
atctggctactcagcagaaccaaga

SEQ ID NO: 691 - DNA, 25 bp, Homo sapiens
  source 1..25: mol_type = other DNA
  misc_feature 1..25: note = LPG10166 3-prime Genome Target Sequence FRDA
agtgctcagtagccacgggggctgg

SEQ ID NO: 692 - DNA, 25 bp, Homo sapiens
  source 1..25: mol_type = other DNA
  misc_feature 1..25: note = LPG10167/LPG10168/LPG10207 5-prime Genome Target Sequence FRDA
agcctgccctgccttcgcccgtgcc

SEQ ID NO: 693 - DNA, 25 bp, Homo sapiens
  source 1..25: mol_type = other DNA
  misc_feature 1..25: note = LPG10167/LPG10168/LPG10207 5-prime Genome Target Sequence FRDA
gtgtgtttgcgcgcacgggcgcgcg

SEQ ID NO: 694 - DNA, 25 bp, Homo sapiens
  source 1..25: mol_type = other DNA
  misc_feature 1..25: note = LPG10167/LPG10168/LPG10207 3-prime Genome Target Sequence FRDA
tgctcagtagccacgggggctggtg

SEQ ID NO: 695 - DNA, 25 bp, Homo sapiens
  source 1..25: mol_type = other DNA
  misc_feature 1..25: note = LPG10167/LPG10168/LPG10207 3-prime Genome Target Sequence FRDA
aaacataggctgcctcgtggaatca

SEQ ID NO: 696 - DNA, 25 bp, Homo sapiens
  source 1..25: mol_type = other DNA
  misc_feature 1..25: note = LPG10169 5-prime Genome Target Sequence FRDA
gaacgaggtgaaactttcagagctg

SEQ ID NO: 697 - DNA, 25 bp, Homo sapiens
  source 1..25: mol_type = other DNA
  misc_feature 1..25: note = LPG10169 5-prime Genome Target Sequence FRDA
caaagccacgtctcagagaggttag

SEQ ID NO: 698 - DNA, 25 bp, Homo sapiens
  source 1..25: mol_type = other DNA
  misc_feature 1..25: note = LPG10169 3-prime Genome Target Sequence FRDA
ccccagccttacctacctggaggct

SEQ ID NO: 699 - DNA, 25 bp, Homo sapiens
  source 1..25: mol_type = other DNA
  misc_feature 1..25: note = LPG10169 3-prime Genome Target Sequence FRDA
accagcccccgtggctactgagcac

SEQ ID NO: 700 - DNA, 25 bp, Homo sapiens
  source 1..25: mol_type = other DNA
  misc_feature 1..25: note = LPG10171 5-prime Genome Target Sequence FRDA
aaacaaagccacgtctcagagaggt

SEQ ID NO: 701 - DNA, 25 bp, Homo sapiens
  source 1..25: mol_type = other DNA
  misc_feature 1..25: note = LPG10171 5-prime Genome Target Sequence FRDA
ccgaggggtgtgcggctgtctccat

SEQ ID NO: 702 - DNA, 25 bp, Homo sapiens
  source 1..25: mol_type = other DNA
  misc_feature 1..25: note = LPG10171 3-prime Genome Target Sequence FRDA
gtagccacgggggctggtgaccacc

SEQ ID NO: 703 - DNA, 25 bp, Homo sapiens
  source 1..25: mol_type = other DNA
  misc_feature 1..25: note = LPG10171 3-prime Genome Target Sequence FRDA
attcttggttctgctgagtagccag

SEQ ID NO: 704 - DNA, 25 bp, Homo sapiens
  source 1..25: mol_type = other DNA
  misc_feature 1..25: note = LPG10186 5-prime Genome Target Sequence FRDA
ctgtctccatgcttgtcacttctct

SEQ ID NO: 705 - DNA, 25 bp, Homo sapiens
  source 1..25: mol_type = other DNA
  misc_feature 1..25: note = LPG10186 5-prime Genome Target Sequence FRDA
ttgaacgaaatgctttcctggaacg

SEQ ID NO: 706 - DNA, 25 bp, Homo sapiens
  source 1..25: mol_type = other DNA
  misc_feature 1..25: note = LPG10186 3-prime Genome Target Sequence FRDA
gctactcagcagaaccaagaatcca

SEQ ID NO: 707 - DNA, 25 bp, Homo sapiens
  source 1..25: mol_type = other DNA
  misc_feature 1..25: note = LPG10186 3-prime Genome Target Sequence FRDA
accagcccccgtggctactgagcac

SEQ ID NO: 708 - DNA, 25 bp, Homo sapiens
  source 1..25: mol_type = other DNA
  misc_feature 1..25: note = LPG10190 5-prime Genome Target Sequence FRDA
attctgccccactccgcagagctgt

SEQ ID NO: 709 - DNA, 25 bp, Homo sapiens
  source 1..25: mol_type = other DNA
  misc_feature 1..25: note = LPG10190 5-prime Genome Target Sequence FRDA
ctaacctctctgagacgtggctttg

SEQ ID NO: 710 - DNA, 25 bp, Homo sapiens
  source 1..25: mol_type = other DNA
  misc_feature 1..25: note = LPG10190 3-prime Genome Target Sequence FRDA
tgctcagtagccacgggggctggtg

SEQ ID NO: 711 - DNA, 25 bp, Homo sapiens
  source 1..25: mol_type = other DNA
  misc_feature 1..25: note = LPG10190 3-prime Genome Target Sequence FRDA
accaccacatgggacagcatattta

SEQ ID NO: 712 - DNA, 25 bp, Homo sapiens
  source 1..25: mol_type = other DNA
  misc_feature 1..25: note = LPG10191 5-prime Genome Target Sequence FRDA
tcgttccaggaaagcatttcgttca

SEQ ID NO: 713 - DNA, 25 bp, Homo sapiens
  source 1..25: mol_type = other DNA
  misc_feature 1..25: note = LPG10191 5-prime Genome Target Sequence FRDA
cggacctggtgtgaggattaaatgg

SEQ ID NO: 714 - DNA, 25 bp, Homo sapiens
  source 1..25: mol_type = other DNA
  misc_feature 1..25: note = LPG10191 3-prime Genome Target Sequence FRDA
gcagcccctgtcacatccctccatc

SEQ ID NO: 715 - DNA, 25 bp, Homo sapiens
  source 1..25: mol_type = other DNA
  misc_feature 1..25: note = LPG10191 3-prime Genome Target Sequence FRDA
taaagcctaactagtttcactccca

SEQ ID NO: 716 - DNA, 25 bp, Homo sapiens
  source 1..25: mol_type = other DNA
  misc_feature 1..25: note = LPG10194 5-prime Genome Target Sequence FRDA
ctgagacgtggctttgttttctgta

SEQ ID NO: 717 - DNA, 25 bp, Homo sapiens
  source 1..25: mol_type = other DNA
  misc_feature 1..25: note = LPG10194 5-prime Genome Target Sequence FRDA
ttgaacgaaatgctttcctggaacg

SEQ ID NO: 718 - DNA, 25 bp, Homo sapiens
  source 1..25: mol_type = other DNA
  misc_feature 1..25: note = LPG10194 3-prime Genome Target Sequence FRDA
ggctgggaaggactctgattccacg

SEQ ID NO: 719 - DNA, 25 bp, Homo sapiens
  source 1..25: mol_type = other DNA
  misc_feature 1..25: note = LPG10194 3-prime Genome Target Sequence FRDA
ccccagccttacctacctggaggct

SEQ ID NO: 720 - DNA, 25 bp, Homo sapiens
  source 1..25: mol_type = other DNA
  misc_feature 1..25: note = LPG10195 5-prime Genome Target Sequence FRDA
ctttcctggaacgaggtgaaacttt

SEQ ID NO: 721 - DNA, 25 bp, Homo sapiens
  source 1..25: mol_type = other DNA
  misc_feature 1..25: note = LPG10195 5-prime Genome Target Sequence FRDA
gtctcagagaggttaggggaatccc

SEQ ID NO: 722 - DNA, 25 bp, Homo sapiens
  source 1..25: mol_type = other DNA
  misc_feature 1..25: note = LPG10195 3-prime Genome Target Sequence FRDA
cccagccttacctacctggaggctg

SEQ ID NO: 723 - DNA, 25 bp, Homo sapiens
  source 1..25: mol_type = other DNA
  misc_feature 1..25: note = LPG10195 3-prime Genome Target Sequence FRDA
gggctgcatctttaacgtttcctct

SEQ ID NO: 724 - DNA, 25 bp, Homo sapiens
  source 1..25: mol_type = other DNA
  misc_feature 1..25: note = LPG10196 5-prime Genome Target Sequence FRDA
gtagggagaagataaaggtgacgcc

SEQ ID NO: 725 - DNA, 25 bp, Homo sapiens
  source 1..25: mol_type = other DNA
  misc_feature 1..25: note = LPG10196 5-prime Genome Target Sequence FRDA
gcagaatctggaataaaggtcgggt

SEQ ID NO: 726 - DNA, 25 bp, Homo sapiens
  source 1..25: mol_type = other DNA
  misc_feature 1..25: note = LPG10196 3-prime Genome Target Sequence FRDA
gacaggggctgcatctttaacgttt

SEQ ID NO: 727 - DNA, 25 bp, Homo sapiens
  source 1..25: mol_type = other DNA
  misc_feature 1..25: note = LPG10196 3-prime Genome Target Sequence FRDA
ggactctgattccacgaggcagcct

SEQ ID NO: 728 - DNA, 25 bp, Homo sapiens
  source 1..25: mol_type = other DNA
  misc_feature 1..25: note = LPG10197 5-prime Genome Target Sequence FRDA
tctgcggagtggggcagaatctgga

SEQ ID NO: 729 - DNA, 25 bp, Homo sapiens
  source 1..25: mol_type = other DNA
  misc_feature 1..25: note = LPG10197 5-prime Genome Target Sequence FRDA
cgttccaggaaagcatttcgttcaa

SEQ ID NO: 730 - DNA, 25 bp, Homo sapiens
  source 1..25: mol_type = other DNA
  misc_feature 1..25: note = LPG10197 3-prime Genome Target Sequence FRDA
ctactcagcagaaccaagaatccac

SEQ ID NO: 731 - DNA, 25 bp, Homo sapiens
  source 1..25: mol_type = other DNA
  misc_feature 1..25: note = LPG10197 3-prime Genome Target Sequence FRDA
agatctgagaaccaatgatcaggta

SEQ ID NO: 732 - DNA, 25 bp, Homo sapiens
  source 1..25: mol_type = other DNA
  misc_feature 1..25: note = LPG10198 5-prime Genome Target Sequence FRDA
ttcacctcgttccaggaaagcattt

SEQ ID NO: 733 - DNA, 25 bp, Homo sapiens
  source 1..25: mol_type = other DNA
  misc_feature 1..25: note = LPG10198 5-prime Genome Target Sequence FRDA
cgtcacctttatcttctccctacag

SEQ ID NO: 734 - DNA, 25 bp, Homo sapiens
  source 1..25: mol_type = other DNA
  misc_feature 1..25: note = LPG10198 3-prime Genome Target Sequence FRDA
tggttctcagatctggctactcagc

SEQ ID NO: 735 - DNA, 25 bp, Homo sapiens
  source 1..25: mol_type = other DNA
  misc_feature 1..25: note = LPG10198 3-prime Genome Target Sequence FRDA
aagatgcagcccctgtcacatccct

SEQ ID NO: 736 - DNA, 25 bp, Homo sapiens
  source 1..25: mol_type = other DNA
  misc_feature 1..25: note = LPG10200 5-prime Genome Target Sequence FRDA
ggattcccctaacctctctgagacg

SEQ ID NO: 737 - DNA, 25 bp, Homo sapiens
  source 1..25: mol_type = other DNA
  misc_feature 1..25: note = LPG10200 5-prime Genome Target Sequence FRDA
tattccagattctgccccactccgc

SEQ ID NO: 738 - DNA, 25 bp, Homo sapiens
  source 1..25: mol_type = other DNA
  misc_feature 1..25: note = LPG10200 3-prime Genome Target Sequence FRDA
gaggctgggaaggactctgattcca

SEQ ID NO: 739 - DNA, 25 bp, Homo sapiens
  source 1..25: mol_type = other DNA
  misc_feature 1..25: note = LPG10200 3-prime Genome Target Sequence FRDA
tggttctcagatctggctactcagc

SEQ ID NO: 740 - DNA, 25 bp, Homo sapiens
  source 1..25: mol_type = other DNA
  misc_feature 1..25: note = LPG10203 5-prime Genome Target Sequence FRDA
ggcaggctggtggaggggaccggtt

SEQ ID NO: 741 - DNA, 25 bp, Homo sapiens
  source 1..25: mol_type = other DNA
  misc_feature 1..25: note = LPG10203 5-prime Genome Target Sequence FRDA
tcctgcggtgcgactgcgggtcaag

SEQ ID NO: 742 - DNA, 25 bp, Homo sapiens
  source 1..25: mol_type = other DNA
  misc_feature 1..25: note = LPG10203 3-prime Genome Target Sequence FRDA
ccagccccagccttacctacctgga

SEQ ID NO: 743 - DNA, 25 bp, Homo sapiens
  source 1..25: mol_type = other DNA
  misc_feature 1..25: note = LPG10203 3-prime Genome Target Sequence FRDA
gtagccacgggggctggtgaccacc

SEQ ID NO: 744 - DNA, 25 bp, Homo sapiens
  source 1..25: mol_type = other DNA
  misc_feature 1..25: note = LPG10204/LPG10205/LPG10208 5-prime Genome Target Sequence FRDA
caaggcacgggcgaaggcagggcag

SEQ ID NO: 745 - DNA, 25 bp, Homo sapiens
  source 1..25: mol_type = other DNA
  misc_feature 1..25: note = LPG10204/LPG10205/LPG10208 5-prime Genome Target Sequence FRDA
ctgcggtgcgactgcgggtcaaggc

SEQ ID NO: 746 - DNA, 25 bp, Homo sapiens
  source 1..25: mol_type = other DNA
  misc_feature 1..25: note = LPG10204/LPG10205/LPG10208 3-prime Genome Target Sequence FRDA
atcaggtactaaatatgctgtccca

SEQ ID NO: 747 - DNA, 25 bp, Homo sapiens
  source 1..25: mol_type = other DNA
  misc_feature 1..25: note = LPG10204/LPG10205/LPG10208 3-prime Genome Target Sequence FRDA
cacgcctgtaattccagcactttgg

SEQ ID NO: 748 - DNA, 500 bp, Homo sapiens
  source 1..500: mol_type = other DNA
  misc_feature 1..500: note = BCL11A enhancer REGION
aaaaatggacaattatgaggaggggagagtgcagacaggggaagcttcacctcctttacaattttgggagtccacacggcatggcatacaaattatttcattcccattgagaaataaaatccaattctccatcaccaagagagccttccgaaagaggcccccctgggcaaacggccaccgatggagaggtctgccagtcctcttctaccccacccacgcccccaccctaatcagaggccaaacccttcctggagcctgtgataaaagcaactgttagcttgcactagactagcttcaaagttgtattgaccctggtgtgttatgtctaagagtagatgccatatctcttttctggcctatgttattacctgtatggactttgcactggaatcagctatctgctcttacttatgcacacctggggcatagagccagccctgtatcgcttttcagccatctcactacagataactcccaagtcctgtctagctgccttcctt

SEQ ID NO: 749 - DNA, 25 bp, synthetic construct
  source 1..25: mol_type = other DNA
  misc_feature 1..25: note = SGN005325 target sequence
tcaacaacagcattattccagaaga

SEQ ID NO: 750 - DNA, 3213 bp, synthetic construct
  source 1..3213: mol_type = other DNA
  misc_feature 1..3213: note = Human codon optimized LPG10165
atgaaaaagctcgactaccgcattggactggacattgggaccaactcaatcggctggggtatcattgaactgagctggaaccgggacaaggagcagtacgaaaaagtgcgcatcgtggacaagggtattcgtatgtttgacaaggctgagatccctaagacgggcgcgagcctggccgagcccagacgcatcgctcgttcctctcgtcgccggctgaaccggaagagccagcgtaaaaaggatattaggaacctcctgatccagcacgaggtgatcaaccagaaggagctcgattccctttacccgctgtccaagaaaagcatcgacatctgggacatcagactggacggcttggacagactgctcaataggcttgaatgggccagactcctgatccacctggctcagcgccggggctttaagtcaaacaggaagtccgaactgaaggacgaggaaacaggaaaggtactgtcctctatccaagccaacgagaagagactgtctttgtatcgcaccgtcggagagatgtggatgaaggatgccgacttcagtaaatatgataaacgcaggaactcccctaacgagtacgtgttctctgtgaaccgtgtggacctggagaaggagattgtgactctgttcgaggctcagcgcaactttcagtctagttatgcgtccgtggaccttcaggagacatacctccagatctgggcccaccaattgccgttcgcatccggtaacgccatcctgaacaaagtcggctattgctcccttctgaaagggaaggaaaagcgtatccccaaggctacctacaccttccagtatttctctgccctcgaccagatcaacaggactcgtctgggccccgagttccagcgtgttactacggagcagaggaacctgatcctggacaaggtgttccagcggactgactactataaaaagaaaacgatccctgaagttacttattacgacattagaaaatggcttgctctggacgagaccattcaattcaaaggcctgatctacgatccgaacgaggaacttaaaaagattgagaaaaagcctttcatcaacctgaagccgttttacgagattaaaaagatcgtggcaaactataccgagaaaacaaacgaggctttttccacgctcgactacgacacagtggcctatgccctgactgtgtacaagaccgacaaagacatccgttcctacttgaagtccccacacaacctgagtaagagatgctacgacgatcagctgatcgaagagttgctcagtctgtcatacacaaagttcggacatctgtcccttaaggcgatcaactacgtgctccccatcatgcaagagggtcgcacctacaaggaggccgctgaccagctgggctttgatactacccacctgaaaaaggagaagcggagcaaattcttgcctcccatcagtgacgaaattaccaatcctattgttaagcgcgccctcacccaggctcgcaaggtggtcaacgccattatcaggcgctatgggagcccccatagtgttcacattgagctggcacgcgagctgtcaaagtctagggaagagaggaacaagatcaaagccgctcaggatgagaattacaaaaagaacaagggcgcaatctctatcctctccgaacacggcatcctcgacccaaccggctacgacatcgtccggtataagctgtggaaggagcagggagagagatgtgcttattccctgaagacaattcccccggacacctttttcaacgagctccgcaaggagaggaacggcagtccgatcctggaagtcgatcacattctgccttatagtcagtccttcatcgattcctatgacaataaagtcctggtctacagcgacgaaaacagaaagaaaggcaaccagatcccctacttttacttcctcgagactaataaggattgggattccttcgagaagtacgtgcgcagcaacaagctgttcagcaaaaagaaatccggctaccttttgaaaaaggcctacctgccccgcgagtctgagctcatcaaagagagacatttgaacgatacccgttatgcctccagttttctgaaaaacttcatcgagcagaacctgcaatttaaagagattgagggcaacccccgcaaaaagcacgtgcagaccgtgaatggcatcattactgcccaccttaggaaaagatggggactcgagaaggatagacaggagacctatctgcatcacgctatggacgcgattatcgtggcctgtaccgaccaccatatggtcaccaaggtcactgagtattaccagacaaaggagtccaacaagagcgttaaaaagccttacttccccctgccttgggagggcttcagggacgaattgctgagccacctggcctctcagcctattgccaaaaagatctctgaagagcttaaggcgggctttcagccttccaattacatcctggtgtccaggatgcctaagcggtccattaccggggccgcacacgatcagaccatcatgaagaaaggaggcatcgataaaaagggtaagaccatcattatcaagcgcctgcagctgaaggatatcaagttcgacgaaaacggggatttcaaaatggttggcaaagaacaggacattgccacctatgaagcgatccgccagcgctacttgaagcatggcaagaacagtaaaaaggccttcgaaaccccactgtataagccctcaaaaaagggcaaaggcaacttgatcaccaaggttaaggtcgaagtgcagaccaagtctttcgttcgggaagtgaacggaggcgtggcgcagaacggcgaccttatccgtattgacctgttcgagaaggactacaagtactatatggtgcccatctacgtcctggacactgtgtgttccgagctccccaacaaggtcgtgacctcttccaagggttacgagcagtggctcaccctggacaacagtttcatgttcaaattttctctttacccctatgatcttgtgcggctgatcaagggggacgaggataggttcctgtacttttctaccctggacatcgacagtgatcgccttatctttaaagacgtgaacaagccttccaaaaagaacgagtatcgttatagcctgaagaccatcgaggacctggagaagtacgacgtgggcgtcctgggagacctgtccctggtccgccaggaggtgcgccggaaattccag

SEQ ID NO: 751 - DNA, 3231 bp, synthetic construct
  source 1..3231: mol_type = other DNA
  misc_feature 1..3231: note = Human codon optimized LPG10166
atgaaatactctatcggcctcgacattggcatcgctagtgtgggctgggccgtcatcaacgaggaaatcgaccgcattgagaacctgggagtgcgcatctttgatgctgccgagaaccctaaggacgggtctagcctggctacaccccgcagggaggcaaggtccacccgtaagagacttcgtcgcagacgccatcgcatcgagcgcgcacgccagttcatcgtgcaacagggcttgctcacccaggtccagatggaacaactgtacgactggaagtccgaggaccttgacatttggctcatccgggtgaatgcgatcgaacggaagctgatggatagggagttcgccagaattctgatccacatggtgaaaaaccgcggcttcaagtccaaccggaagtccgagcttaaggagggcgacaatggcgttgtgctgtctgctgtgcaggagaataagcagctgatggaagagaaggaatatcagaccatcgccgagatgctgctctttgacgagaagttcgagggcagaaagcgtaacaagggcggtgcctactctcacgttgtgagccgcagcgagctggagagcgagatccgtcttatttttcagaagcagcgcgaatacggacatcacttcgcccgcgaagagaacgaggaagcgttcatcaacatctgggcgtcccagcgtccctttgcaactaaagatgacatcgcaaaaaagattggtacctgcactttcgaagagaacgaaaaacgcgttccgaagtccacctacacctttgagcgcttccgggccttcgataagcttaatcggctgagaatcgtatccactgtcgctccaaccagggccctcaccgaagaggaaaagtctctgatcctcgactctctcttctctaaaaaggaagtgaagtacaaggagcttcgcaagctgctcaagctgcaagacgagcagagatttaacgagctctactatgatccgaacgagacgaacgacaagaacgagaaccgcaccttccttagcctcgagagccaatacaaaatccgcaaggtcatccaacaggtagagggcaagaatattaatgattcttatcgccctgttgacctggatacaatcgcttatgctcttaccactttcaaagacgatcatgacatccgggactacctgcagaatcgttacgtcagttcccacggcaagaaaactgagaacctggctaatcgcgtgtacaaggaggaacttattgaggaactcctgcagctgtcttttagtaagtatggccacctgtccctgaaggccctgaagaacatcctgccccacatggagaagggcatcccctaccacaaggcatgtgaagaggcgggataccagttctctaagaaagccgacaaagacaaggaatacttcctgccggtgatccaggccaaggacatcgctaatcctgtcgtggttagatctctctctcaggtgagaaaggtgatcaatgggatcattaaaaagtacggctctccatctgctatttacatcgagctggctcgcgaaatggggagagtgtataaagagcgcaaggagattgaaaagcagtacaacaagaaccgcgacatcaacgaaggtgccaaacagcacatcctcgagctgcaccccgagttcggccaccctcgcggccacgatatcctgaagtacaagctctggaaggaacaggacggccgctgcgcctactcctttgagcccattagtatggagagactctttcatatcgggtatgctgaggtggaccacgtcatcccctattcccgtgggttcgacgattccaactccaacaaagttctcgtgttggctgccgagaaccagaataagcagaacagaacaccgcatgagtggttcgggcacgatgagacccgctggcaacagttcgtctccttcgtgactaccatgaaggtgtccaaaaagaaaaagggtctgttgctgaagaggaatctggacgaggaacaggccgaagagttcagatcccgccatctgaacgacacacgttatatcaccaggtacatcaagtctttcatcgaagacaaccttcaatttcgcctggaagagggaaaaaagcagtacgtgcacactgtgaacggcgcctatacaagcttgatgcgcaagcggtggggatttaacaagaacagacaggagaacgacctccatcacgcactggacgccgtgattatcgcagtcagcctgccctttaagcatagagtgtctgcctatttcaaacgccgtgaagagtacgcgcacaaccaactgaaacgggaacgcgaatttttccctgagccatggcctggattcgtgcacgaattggagatcagaatgatgcagaacgccgagaagatgaagctgggccttgaaagcctggacctgaagacctatgacgaatctttccttcgcgaggtgcaacctattttcgtctctcgtatgcccaagagatccatcaagggtcaaattcatgaggccactctgaagcgcgtgagaggaaacactgaggacggttacattaggactgtgaagaaagtgaggctggatcagattccttttgacaagaacggtgattttcccatgttcggaaaagagacagatatgaagacctatgaagcaatcaagaaccgctatctggagtacaaaaaggacaagaaaaaggcattcctggagcccctgtacaaaccagctaagaatccggagaacgccccaattatccgcagtgttaaaatcgaggacaaggctaatagggtagtgatgctggatgacaagacggcggccgacaatgcgagcattgtgaagactgaggttttccgccatagggagaccggaaagtttttcctcaccccgatctacgtgtcagatgtgctgagcaaccggatcccggagaagttcatcacccccggcaagccctactcacagtggaaggacatcactgatgagtacgagtacctgttcgctctgtaccctaacgacttgatccgcgtcaaaatgcctaaggagaaggagaccaagaccaacattggcgagaagcatgtgtggcaggagaacttcatgtactttaagggtgtgcactccgccgacgctggcattaagctgatcgaccatatgaatagttttgaagacaaaatcggtacccagcgtctcgttgccttcgagaagtaccaggttgacccccttggagagttgaccaaggtccacggcgagaaacgccatgggatt

SEQ ID NO: 752 - DNA, 3231 bp, synthetic construct
  source 1..3231: mol_type = other DNA
  misc_feature 1..3231: note = Human codon optimized LPG10167
atgaagtacagcatcggtcttgacatcggaattgcctctgtcggttgggccgtcattaacgaggaaatcgacagaattgagaatctgggggtgagaattttcgacgcagccgagaaccctaaagacgggtcatctctggccactcctcgcagagaagcccgctccaccaggaagaggcttcggagacgtagacaccgcatcgagcgcgcccggcagttcatcgtgcaacagggcttgctgacccaagtgcagatggagcaattgtacgactggaagtctgaggaccttgacatctggctgatccgcgtcaatgctatcgagcgcaaactgatggaccgcgagttcgctcgcatcctcatccatatggtaaaaaacagaggcttcaagagcaaccggaagagcgaactgaaggagggagataacggagtcgtgctgtcagcggtacaggagaacaagcagctgatggaagagaaggagtaccagactatcgccgagatgctgcttttcgacgagaagttcgagggcaggaagaggaataaaggaggcgcatacagtcatgtcgtgtctcgctccgagctggaaagcgagattcgcctgatctttcagaaacagcgcgaatatggccatcacttcgcccgtgaagagaacgaagaggccttcatcaacatttgggctagccaacgtccctttgccaccaaggatgacatcgctaagaaaatcggcacctgtaccttcgaagagaacgagaagcgcgtgcccaagagcacttacacctttgagagatttagagccttcgacaagttgaatcgcctccggatcgtctccactgtggcccccaccagggccctgaccgaggaagagaagagcctcatcctggactccctgttctctaaaaaggaggtcaagtacaaggagcttcgcaagctcctgaagctgcaggacgaacagcgctttaatgagctgtactatgacccgaacgaaacaaatgacaagaacgagaaccgcactttcctgtccctggagtcccagtacaagatccggaaagtgatccaacaggtggagggcaagaacattaacgactcctacagacctgtggacctggatactattgcctatgcactgaccacttttaaggatgaccatgacattcgtgattacctccagaaccgctacgtgtcctcacatggcaaaaagaccgagaatctcgctaaccgcgtatacaaggaagagctcatcgaagagctgttgcagctgagtttctctaagtacggtcacctgtccctgaaagcgctcaaaaacattctgcctcatatggagaagggcattccttaccacaaggcatgtgaagaggccggctatcaattcagcaaaaaggccgataaggacaaggagtacttcctgccggtgatccaggcgaaggatattgctaaccctgtagtggtccgcagcctcagccaggtcaggaaggtaatcaacggcattatcaaaaagtacggaagcccttctgcaatctacatcgagctggcgagggagatgggccgcgtctataaggagagaaaggagatcgagaagcagtacaacaagaatagggacatcaacgagggtgccaagcagcatatcctggaacttcatcccgagtttgggcatccacgcggacatgacattcttaagtacaagctgtggaaggagcaagacgggcgttgtgcgtactccttcgagcctatttcaatggagcgtctcttccatatcggatacgcggaggtggatcacgtcatcccttactcaaggggttttgatgactctaacagtaacaaagttctggtcctggcagccgagaaccagaacaagcagaaccgcacaccacacgagtggtttggccacgatgaaactcgctggcaacagttcgtgtcctttgtgactaccatgaaggtcagtaaaaagaaaaaggggctgcttctcaagcgtaacctcgacgaagagcaggcagaggaattccgctctcgccacctgaacgatacccgctatatcacacgttatattaagagtttcatcgaggacaatctccagtttcgcctcgaagaggggaaaaagcagtatgtgcatacagtgaacggcgcctacacttcactcatgcgcaagaggtgggggtttaataagaaccggcaggagaatgacctgcatcacgctctggacgctgtcattatcgccgtgtctctgccttttaagcatagggtaagcgcatacttcaagcgcagagaagagtatgcacacaatcagctgaagcgcgaacgcgaatttttcccagaaccctggcctggtttcgtacatgagctggaaattcgcatgatgcaaaacgctgagaagatgaagctgggactggagtctctggacctgaaaacttacgacgaatccttcctgagggaggtccagccaatcttcgtctctcgcatgccaaagcgctcaatcaagggccagattcacgaggccacactgaaaagggtgcgcgggaacacggaagatggctacatccgcaccgtaaagaaagtgaggttggaccagattcctttcgataagaatggtgatttccccatgtttggaaaggagactgacatgaagacatacgaggccatcaaaaatcgttacctggagtataagaaagacaagaaaaaggcttttctggaacctctgtacaagccagccaaaaaccccgagaacgcccctatcattcgcagcgtgaagattgaagataaagctaacagagtggtcatgctggacgataagacagctgccgataatgcttcaatcgtgaagaccgaggtctttcgccatcgggaaaccggcaagttctttttgacccccatctacgtgtccgacgtcctcagcaaccggatccctgagaaatttattacacccggcaaaccctattcacaatggaaagatatcactgacgagtacgagtacttgttcgctctttacccaaacgatctgatcagagtcaaaatgcctaaagagaaggagaccaagaccaatattggtgaaaagcatgtgtggcaggagaactttatgtacttcaagggagtccactcagccgacgccggaattaagttgatcgaccacatgaacagcttcgaggacaaaatcggcacccagaggctggtcgccttcgagaagtaccaggtcgacccactgggtgagcttaccaaagtgcacggggagaagcgtcatggaatt

SEQ ID NO: 753 - DNA, 3231 bp, synthetic construct
  source 1..3231: mol_type = other DNA
  misc_feature 1..3231: note = Human codon optimized LPG10168
atgaagtacagcattggtctggacatcggaatcgcaagtgtgggttgggccgtcatcaacgaagaggtgaaccgcatcgaaaatcttggtgttcgtatctttgacgtagcggagaacccaaaagacggctcttccctggctaccccaagacgcgaggctaggtccgctcgcaagcggctgcgtcggcgcagacacaggattgagagaactcggcagtttatcgtgaaacagggccttctgactcaggtgcagatggagcagctgtacgattggaagtccgaggacctggacatctggcttatccgggtgaacgccatcgagcgcaagctgatggaccgtgagtttgcccggatcctgatccacatggtgaagaaccgcggctttaagtctaaccgtaaatccgagctgaaggagggcgacaacggcgtcgtgctctcagccgtacaggagaacaagcagctgatggaagagaagggataccagaccatcgccgagatgctgcttttcgacgaaaggtttgagggccgtaaaagaaacaagggcggtgcctactctcacgtcgtgtccagaagtgagctcgagtccgagatccgcctgatctttcagaaacagagggaatatggacaccatttcgcacgcgtggaaaatgaagaggtgttcatcaacatctgggcttcccagcgcccgttcgcgacaaaggacgatattgctaaaaagattggtacatgcacattcgaagagaatgaaaaacgtgtgcctaagtccacttatacttttgaacgtttccgtgctttcgataagctgaaccgcctccgtatcgtgtccaccgtggccccgactcgtgccttgaccgaagaggaaaaaagcctcattctcgatagtctgttcagcaaaaaggaggtgaagtacaaggagcttagaaagctgctcaagctgcaggatgaacaaaggtttaacgagttgtattacgatccgaatgaaacgaacgacaaaaacgagaaccgcaccttcctgtccctggagtctcagtataaaatccgcaaagtcatccaacaggtggaggggaaaaacatcaacgacagttacagacccgtggacctggacacaatcgcttatgccctgacgactttcaaagacgatcacgatattcgcgattatctccagaacaggtacgtaagctcccatgggaaaaagaccgagaacctggccaaccgcgtctacaaggaagagctgatcgaggaattgctgcagctgtccttttctaagtatggacacctgtctctgaaagctctgaagaacatcctgccccatatggaaaagggaattccttatcacaaagcatgtgagcaggctggataccagttctctaaaaaggctgacaaggataaagaatacttctccccagtcattcaggctaaggacattgccaacccagttgtggtccgttctttgtcacaggttcgtaaagtgattaatggaattatcaaaaagtatggctccccttccgccatctacattgagctggcaagggagatgggccgggtgtacaaggagcgcaaagaaattgagaagcagtataataagaacagagatatcaacgagggagccaagcaacacatcctggagctccatccagagttcggccaccccaggggccacgacatccttaaatacaagctgtggaaggagcaggacggccgctgcgcctactctttcgagcccatttccatggaacgtctgtttcacatcggctacgcagaagtggatcacgttattccttattcaagggggtttgatgactccaacagcaataaggtgctggtcctggccgcggaaaaccagaacaaacagaaccgcacaccccatgagtggttcggacacgacgagactcgctggcaacagttcgtgtctttcgtgactaccatgaaggtcagcaaaaagaaaaagggccttctgctcaagcgcaacctggacgaggaacaggccgaagagttccgctctagacacctgaatgacacccgttacatcaccaggtacattaaatccttcatcgaggacaacctgcagttccgcctcgaggaaggcaaaaagcaatatgtgcacactgtgaacggtgcgtacacttccctgatgcgcaagcgttggggcttcaacaagaatcgccaggaaaacgacctgcatcacgcactcgacgccgtcattatcgccgtgtccctgccattcaagcaccgtgtgagcgcttacttcaagagacgtgaagagtatgcacacaaccagcttaagcgtgagcgggagtttttccctgagccttggcctggcttcgtgcatgagctggagattcgtatgatgcagaacgctgagaagatgaagctcggtctggaaagcctcgacctgaagacttatgatgagtcctttctgagagaggtccagcccattttcgtgtctcgcatgcctaagcgttccatcaaggggcagatccatgaggcgactttgaagcgggtgcgcggaaacaccgaagatggatacatccggaccgttaaaaaggtgcgtctggaccaaatcccttttgacaagaacggcgacttccctatgtttggaaaggagaccgatatgaagacctacgaggctatcaaaaaccggtacttggaatacaaaaaggataagaaaaaggcgttcctcgaaccgttgtacaagccggccaagaatccggagaacgctcctattatccgttccgtgaagatcgaggacaaggccaaccgtgttgtaatgctggacgataagacagccgctgacaatgcctctattgtgaagaccgaggtgttcagacatcgcgaaactggcaagtttttcctgacgcccatttacgtgtccgatgtcctcagcaataggatcccagagaagttcatcaccccaggcaaaccatatagtcagtggaaggacatcactgacgagtacgagtacctgttcgccctgtatccgaacgacctgattcgcgtgaaaatgcctaaggaaaaggagacaaagactaacattggggagaagcatgtctggcaggaaaacttcatgtacttcaagggtgttcactctgctgacgctggcatcaaattgatcgaccatatgaacagtttcgaggataagattggaacccaacgtctggttgcttttgagaagtatcaggtggaccccctcggcgagctgactaaggtgcatggtgagaagcgccacggtatt

SEQ ID NO: 754 - DNA, 3228 bp, synthetic construct
  source 1..3228: mol_type = other DNA
  misc_feature 1..3228: note = Human codon optimized LPG10169
atgaaatactcaatcggcttggacatcggaatcgcttctgtcggatgggccgtcatcaacgaggacctgggaaggatcgagaacatgggggtgcggatctttgatgctgcggaacaccccaaggatggctcttccctgtccacaccacgtagagaggcacgctccgctaggaagcgcctgcgcaggcggagacatcgcgtggaacgcaccagatattttatgattcagaagggcctcctgactcaggtgcagatggaacagctgtacgactggaagcacggcgatctggacatctggctcattcgcgtgaatgctctcgagcgtaaactgaccaaccgtgagttcgcgcgcgtgctgatccatcacaccaagaaccgtggtttcaagagcaaccgcaagtccgagctgaaggagggcgataatggcgtcgtgctcagcgcagtccaggaaaataagcgtctgatggaggaaaaggggtatcaaactatcgccgagatgcttctgctcgacactaagttcaagggtctcaagcggaacaaaggcggagactacagtcatgttgtggcaaggagcgagttggagcacgaaatcagactggtgttcgccaagcagcgggagtttgggcacaggtttgccagcgtggaaaacgaggaaggttacatcgccatttggtctagccagaggccgtttgccacaaaggatgacatcagtaaaaagatcgggtactgcaccctggaacccaaggagcggagagctccaaaatccacctacactttcgagcgttttcgggccctggacaagctggccagactcagaatcctgtcttccaccaaggagaaccgcgctctcactgacgatgagcgcgaactgattctgaactctctcttttccaaaaaggaaatgaaatataaggaactcaggaagttgctgaaattgcaggacaccgacaggttcaacgagatcttttacgatccagaggccaccgccgataagaacgaaaaccgtaccttcttgtccctcgagtcacagtacaagatccggagtatcattcaacaggtggagggcaagaaaatcaatgacagctaccgtcccatcgattttgataccattgcttacgcccttacagtattcaaagacgatcaggacattcgcgactatctgctcaacgactatgttgagtccaacgggaagcgtacaaccaatctggccaaccgtgtctataaagaagaggtgatcgaagagctcctgcagctcagctttgccaagtttggccacttgtctctgaaggccctgaagaacattctggtgcacatggaacagggcctgccctattacaaggcctgtgaagaggctggataccagttcaactcaaaccagaacaaggataaacagagaatcctgcccgtcatccccgctaaggaaatcgctaaccctgtcgtggtccgcagcttgtctcaggtgcggaaggtggtcaacggaattatcaaaaagtacaacatccccagcgccatgtacattgaactggcgcgcgacatgggtcgcgtttacaaggagcgtagggatattgagaaacagtacgataagaaccgccagattaacgaagcagccaaagagcgtatcattgagtacagcgagggccgcttcacgccgaaggctcacgacatcctgaaatacaaactctggcaggaacaaggcggtagatgcgcctattcatttgctcctatccctatcgaatccctgttcaacatcggatacgtggaagtggatcatatcattccctatagcaggtcttttgatgactctaacaataacaaggtgctggtgctgtccgcggagaaccagaacaagagaaaccagaccccctttgagtattttggacacgatgtggtcaagtgggagcagttcaagtcctttgtgaccacgctgaaggttgccaagcgcaagaaaatgctgcttctgaaacagaacttcgatgaacaacaggccgaagagttccgtagcaggaacctgaacgacacccggtatatcacccggttcattaaaaatttcatcgaagacaacctgcagtttagggaagaggaaggaaacaagcaacacgtgttcactctgaatggagcatacacctccctcatgcgtaagcgttggggttttaacaagaaccgtcgcgaaaatgatctgcatcacgccctcgatgctgtccttatcgcagtgtcttggcctttcaaacaccaggtcagtgcctacttcaatcggcgcgaggaatatgcccgtaaccagctgaagagggaaggagagtacttccctgaaccttggcctggattcatccacgaacttgaaatccgcatgatgcaggacgaggacaaaatgaaactggcactggagagccttgacctgaagacttatgacgatgactttatcaaccgcgtgaagccaattttcgtgtcccggatgcctaaacgcagcattaagggccaaatccacgaagccacgctgaagagagtgcgtggcaacactgaagacgggtatatcaggaccgtgaaaaaggtgagactcgaccagatccctttcgagaaaaacggcaattttcctatgtacggaaaggaaactgatcttaagacctacagcgcgatcaaaaagcgttttctggagtacggggaccgcaaaaaggctttcgccactcccctgtataagccagcgaaagaccccagcaaggcccccattatccgctcagtgaagatcgaggaaaaagccaaccgtgttgtgcatctggacgaaaagaccgttgccgataatgcctctattgcaaaaaccgaggtcttcagacatagaaagaccggccagtattacttgacccctatctatgtggctgacgtcgtgaatggcattatccctgaccgcctgatcagcaccaagaaaccatattccgagtggcgtcggatcacagatgaatacgagtttctttttagtctgtatcctaatgacttgattcgcatcaaaatgcctaaggagaaggaaactaagaactttatgaaggagacccacatctggcaagaggggttcatgtactatcgcggagtccatagcggatctgccggcgttcgcatgatcaaccacatgaactcctttgaggatgagatcggtgtccagaaattggagctgtttgaaaaataccaagttgacccattgggcggtatcactaaagtgcatggtgaaaagcgttatggcatc

SEQ ID NO: 755 - DNA, 3258 bp, synthetic construct
  source 1..3258: mol_type = other DNA
  misc_feature 1..3258: note = Human codon optimized LPG10171
atgcctttcagacagccagttagctacgctttcgatatgggcaccaactccatcggttggtgtgtgttccgcctgtctgcagccggccacccagtggccatcgccgacgcaggggtgcgtatttattccgacggcagggatccccagtccaagacaagtctggcggtcgccagacgtgaagccaaggcggcagccagaaggcgcgatcgcaccaagaggcgccagaaggcaaccctgcgcaccctggccgagtatggcctgatgccgggtgggaaggacgaacgcgagcgtttgctgcgcgaaaccgccgatagcgctgacagaaacgctcccgctaatgatcccctgaacctgcgcgcgcgtgctctgactgagaagctgcccctgcatcacatcggacgcgccctgttccatctggggcagcgcagaggattcaaatccaatcgtaagaccgatcgccgtgataacgacaaggggaaaatcgccatcggaatcgaccgcctcagggatgcgattcgggaagctaaggccgagacactgggcgtctttctggcctccaggcgcgcgcagggccttcacgtgcgtctgcgcgccgggtccagtgtgatcttggatgacgggtatgacttctatccggtacgtagcctcctggaagaggaatttcgccacatctgggatgctcaggcggtccactaccctgatgtcctgaccgaggctagaggcgagcaccttttcaaggtgatctttcatcagcgccctctgaaaaagcctcggattggaagctgcaccttcaaccctctggaacagcgcctggcgaaggctcaccccctgtttcaggcctttcggctgtataaagaggtgaatgaacttgaggttgtcgcccccgatcttagccagagaaagctgaccctggacgagcgcgacgccctggtgctgaagctgcgcggtgcgaaaaccgccaagtataagaccctgcgtaaggacctgaagctgaccccggatatgcgtttcaacaaagagtccgagaacagagtcgatatggctggcgatgaggtgacagcggccctctctgcgaagggtctgtttggcccccgctggaacacactgtccatggattcacagtggaaggtgatcgagcgtattcaggaggaagagaaccccttcgtacttcaccagtggcttgtggagactcacggactctctgatgacgcagctgaggccgtggccgcttgccacctgcccgaggggtatggcagactgggacatacagcgctcagcaccatgctggaggaactgcgcgctgatgtcatcccggaggctaaggctgcggaacgcgccggatacaaccactcctacttcggtacaggggagatctttgacgaactgcccaagtaccaggaggtagttgcccgttctattcctccaggtaccggtgacctggaagacgaatacgacgtgagaaagggccgcatcaccaaccctactgttcacatcggcctcaatcagctgcaacgtctggtcaacggactgattcgtcgcttcggaaagccagccgagattgctgtggagctggcccgtgacctcaagactaacgagaagaaaaagaccgaaatcaacaggcgcatcggtgagaacacacgtgcggcccgccagcgctctgaaaagattgctgagttgcgcaaggatacaccagctctcgtggacaacggttacaacaggctgttgctgaagctgtgggaagagctgaaccctgctaagcccgaggaccgctgctgtatctacacgggcaaacctatttccatcagcatgctcttctccggggccgtagatgtggatcacatcctgccctatagccggaccctcgatgacggacagggcaacaagctcctgtgtctcaaagaggccaaccgcgtgaagcgtaatcgcgcccctagtgaagtgaccgagtgggcaaatcactacgatgaaatcctggagcgtgcgaacaggctgccaaagcccaagagatggcgtttcgctcgggatgtgatggcggactttgacgccgacagcggattcctcgatcgccagctgacagacacccagtatttgagccgtctggctcgtgagtacctgtgttccctgtaccctgagaaacacgagcaatggcgcgtgcgcgttatccctggtcggatgaccgagatgctccgccggcactggggcctgaacaccttgctgcccgaccacaactattccgatgccaagaataggaacgaccacagacatcacgcaatcgatgctgccgtagttggcgtgaccactcgttctatgctgcagcgtatctccactgaagccgcaagacgcgaagagcaggaactggaggacgtggtcaagggaatcccagttccatgggaacactttcgcgatgacctccaacaggctctcaataacatcgtagtgagccacaaacccgaccacgggactgtgggcctggacgataagggcaagtggcagaccgccggtaagctgcacaatgacactgcctatgggttgacaggcgaagtggacgcacgggggaacactatcgttgtgaggcgcaagatgcttctgtccctgacagacaaggacatccccgctatcagggacgatgagctgcgggcaagactgtactccgcagctggcggattgtctggcaaagaactccaacaggctctcctggatttcgcccgcaacgaccccaagtaccgcggaatcaggagagtacgcgttactgagactctggccgtgatccctatccgcgataaggatggtaacgtctacaaagggtacaagggcgacgccaactaccgctatgatgtgtgggagatgaaagatggaaagtggcaggctgaggttatctccatgttcgacgctcatcaaaagggttgggagagtcctgttcgtaaagctaatcctacagctaggaaggtcctcagcctccaacagaacgacatggtcgcttacgagcatccctcagatggctacaccatcgcacgcgtcgtgaagttcgccagtagcggccagatcgtctttgctcgcaataacgagggtggctccctcaaggcccgcgacgcgaatcgtgatgaccctttcaagtactttagcaagaccgccaacggactgagagagatcaaggcgagacagatccgcatcgatgagaccgggagggtgtatgatcccgggcctcgcgacagagaatcaaggatgatcggaaaccagaagctgaagaccatcgccatc

SEQ ID NO: 756 - DNA, 3276 bp, synthetic construct
  source 1..3276: mol_type = other DNA
  misc_feature 1..3276: note = Human codon optimized LPG10186
atggcctacaccatggggatcgatgttggtatcgctagctgcgggtgggccatcgtcgatttggaacgccagcgcattatcgatctgggggtccgcatcttcgagaaggctgagaaccccaagaatggcgaggctctggcagtgcccaggcgcgaggcgcgttcttcccggcgcaggctgcgccgtaaaaagcataggatcgagcgcttgaagtacatgttcatccgtaacgggctggcggtggatatccagcatctcgaacagacccttcgcagccagaacgaaatcgacgtctggcaacttagagtggatggcctggaccgtgtcctgactcagaaggagtggctgcgtgtgttgatccatctggcacaaaggcgcggatttcagtccaaccgtaagaccgacggctccaacgaagatggccaggtcctcgtgaacgtcaccgaaaacgagaagctgatggaggaaaaggactacaggacagtcgctgagatgatggtgaaagacgggaagttctccgatcataaacgcaacaagaacggaaactaccacggtgtcgtttctcgtgccagcctcctggtcgagatccacacgctcttcgagagccagcgtcagcatcacaactttttcgccagcaaagactttgaactcgaatacgtaaacatctggtccagccaacgccctgtcgccacaaaggaccagatcgagaaaatgatcgggacatgcaccttcctcccgaaggagaagcgcgctcctaaggccagctggcacttccagtatttcatgctgttgcagaccattaaccacatcaggatcactaacgtgcaggtgacacgttccctgaacaaagaagagatcgagcaagtggttaatatggccctgacgaagagtaaggtgtcttaccatgatatcaggaagattctggacctgtccgaggaatatcagtttgtcggactggactacggcaaggacgatgagaagaaaaaggtggagagcaaggagacaatcattaagctggatgactaccacaagctcaataagatctttaacgaggtagaattggctaagggcgaggcctgggaagctgtggactacgacaccgtcgcttacgcgctgacctttttcaaggatgacgaggacattagggattacctgcagaacaagtacaaggacagtaaaaatcgtctggtcaagaacctctccaacaaggaatacaccaacgaactgattgaaaaggtgagtaccttgagcttccgcaaggtgggtcacctgtcactgaaggccctcagaaaaatcattccctttctggagcagagcatgacatacgacaaggcctgtcaagctgccggctttaacttccaggggatctccaagaaaaagcgcagtgtgattctgcctgttatcgaccaaatctccaaccccgttgtcaaccgcgcgctgacccagacccgcaaggtgatcaacgcgctgattaaaaagtacggcagccccgaaaccattcacatcgaaaccgcgagggagctcagcaagaccttcgatgagcgcaaaaatatcactaaggactacaaggagaaccgcgataagaacgaacgcgcaaaaaagcacctgtccgaactggggattatcaatcctaccggcttggatattgtcaagtacaagctgtggtctgagcaacagggtcgctgcatctactctaaccagcctatcagcttcgaacgtctgaaggaatccggttataccgaggtcgaccacattatcccctacagccgttctatgaacgacagctataataaccgcgtactggtgatgactagagagaaccgcgagaagtcaaaccagacaccatacgaatacatggggaacgacacccaacggtggcatgagtttgaacagagagtgacaaccaacctgcaaatcaaaaaggagaagcgtcagaatctgctcctgaaaggcttcaccaacaggcgcgaactggagatgctggaacgcaatttgaatgatacccggtacattaccaaatacctgagccatttcatctccaccaatctcgaattcagtcctagcgacaaaaagaaaaaggttgtgaataccagtggccgcatcaccagccacctccgctctcggtggggactggagaagaaccgggaacagaacgacctgcatcacgccatggatgcggttgtcatcgctgtcacctccgactctttcatccagcaagtgaccaactattacaagcgcaaagaacgtcgcgagctgaatggcgacgataagtttccgttgccctggaagttctttcgcgaagaggtgattgcccgcctgagtccaaaccctaaagagcagatcgaagctctgcccaaccacttctattctgaggacgagctggcagacctgcagccaatcttcgtgtcccgcatgcctaagcgctcaatcaccggcgaggcccaccaggcccagttccgcagagtcgtgggcaagacaaaggagggtaagaacatcaccgccaaaaagaccgcactggtggacatctcttacgacaaaaacggcgacttcaatatgtatggcaaagaaactgatcccgccacgtatgaggctatcaaggagcgctacctggagttcggaggcaacgcaaagaaagctttcagtactgacttgcacaaacctaaaaaggatggtacaaagggtcccctgatcaagtccgtgcggattatggagaataagaccctggtccaccccgtaaacaagggcaagggagttgtgtacaattccagcattgtgcggaccgacgtgtttcagcgtaaggagaagtattaccttctgcccgtgtacgtcactgacgtgactaagggcaaactgcccaacaaggtcattgttgcaaaaaaggggtatgatgactggatcgaggtggacgatagctttacgtttctgttcagcctgtaccccaacgacattatctttattcgccagaatcccaagaaaaagatttccctgaaaaagcggatcgaatcccacagtatctccgactccaaggaggtacaggagattcatgcttattacaagggagtagacagttctacagctgccatcgagttcatcactcacgacggctcctattacgccaagggggtcggagtccagaatctggattgtttcgagaaatatcaggtggacatcctgggcaactattttaaagtgaagggcgagaagcgcctggagctggagacatctgatagtaaccacaaggggaaggatgtcaattccatcaagtccacctctcgc

SEQ ID NO: 757 - DNA, 4146 bp, synthetic construct
  source 1..4146: mol_type = other DNA
  misc_feature 1..4146: note = Human codon optimized LPG10190
atgatcaagaaagattataacctcgggctggatatcggagccaccagcgtggggttcgctggcatcgatgagcaatatgatccaatcaagctgaagggcaagaccgtggtcggcgtgaacctgttcgaagagggcaagaccgcagctgatcggcgcggctttagaacaacccgtcgcagattgtctcggcgcaagtggcgcttgtccttgctggaagagtttttcgacccctacattacaccagtggatcccacttttttcgctcgcctgaaggagagcaacttgagtccgaaagataataacaagaacttttccgggagtctcctgttctctgacatcacggaccaaaagttttatgaagagtaccctacaatctaccatctgcgctatgctctgatgacagagaacaaaaagttcgacctgagagcgatctttctggccatccaccatatgattaagtaccgcggaaattttctcaactctacgcctgtggctcacttcgatacgagcaagatcaattttgcctccgacctgaacgagttgaacagcctgtacctgaatgaggaccctaataacattttcgagatcaacctgcagaacgtcaaggagattagcgacattctcctggaccattccatcaaaaagttcgataaacagaagcaggtggccaagctgttgctgacgagccaaaacgacaaggagttggataaaatcaacaagcagatcgctactcagatcagcaaggccattctcggctacaacttcagccttaatgagatcctgaagattgaggtggaggacaagtccaagtggaaactgaatttcagttccgccgacatcgatgacaagctccctgacctgatctccgagctcgacgaaagccaagaatctatcctgaacattatcctgagcctgtactcccggttgaccctgaacggcattgtgccttctggaatgagcctctccgaggctatgatcgacaagtacggcacccacaaagagcatttggaccttctgaagaaatacctgaagactctgcctatcaagaataggaaggagatcgctgaagcgtacgcggagtacgtgggcaattccctgaaaaagagcggtcacattagtcaggaagagttctacaaggcggtgaaaaagaacctggacaaatcagagactgcgcaggcgatcctgggccttatcagcgaggaaaagtttatgcctaagcagaggacaaaccagaacggggttattccatatcaacttcatcagaaggaactggatcagatcattgtgaaccagtcccagtattacccatggctcgcagagctgaatcctgtgaccgaacacaaggacgccaaatacaagctggatgagctgattgccttcagggtcccttactatgtcggccccctgatcgatcctaaaactacaccccagactgagcagggtaacaagaacgcgagcttcgcctggatggtcaggaaggagaacgggcagatcacgccatggaacttcgataagaaagtggacagaatcagctctgccaataactttatcaaacgcatgaccactaaagacacttacctcatcggcgaagacgtactgcccgctcattccctcatctatgaacgcttcaaagtgttgaacgaattgaacatgattcgtgtgaatgggaagaaactttccgtttccgtgaaacaaaacttgtataatgacttgttcaaacaacagaagactatcaacaggaagaaactggctaactacctgcaggcgaacctcgggatccccgaacgtccccaaatcactgggttgtccgaccctgagaagttcaacagccagctgtcctcttacatcgatctgcagaagatcctgggaagtgaaatcgtggacgatccgaacaaacaggatgaccttgagaagattatcgaatggtccaccgtgttcgaggactctcgcatttataaggtgaagctgcaggagatcggctggctgaccgagaagcagaagaacgaactcgttagccacagataccagggctggggacgcttgagtcgcaagcttctggtggagctgaaggacaagaacggaagaagtatcctggacatcctgtggaacagccagcgtacttttatggagatccagagccgccctgagttcgccgagcagatcaccaacgagaaccaagacaagctgaccgaagataactacgaagacgtgctggaggacgcttacacttccccacagaataaaaaggctatccgccaggtgatcaaggttgtggacgatattgtcaaagctgccgggaaagcgcccaagtttatctcactggagttcgcccgctctgacgaaagatcagaccgcgttaagagccgcaagacccagattcagaagatctacgagaccactgctaaggagctcctgaaggacgatcaattgatcaaggagcttgggtcagtcagcgacctgagcgaccgcctttacctgtacttcactcaactgggtcgtgatatgtataccggaaagccgatcaacatcgatgagatttcaacaatgtacgacatcgaccatatcctgccgcaggcctttctgaaggacgatagcctggataaccgcgtgctggtccggagacaggacaataacgcaaagagtgacaccgtccctgcactgaagtttggaaagatgaagcccttttggaacaagttgcagaagcacggcctcatctcaaaaaggaagctcaacaatctgcaaacgaaccccgagtctatcgataagttcaaggccgtgagcttcgtgaatcgccagcttgtcgagacacgccaggtgattaagctggccgctaacatcctcgcctctcgctatcccgacagcaaaattatcgaggtgaaggcgtcactcacgcaccaaatgcgtgaaagcttcaatctgatcaagaatagagatgttaatgactaccatcacgccgtggatgcctacctgtccgccttcgtgggccagtacctttacaaccgctatccaaagctgcagccgtactttgtgtatgggcagtttaaaaagtttgataagcagtccacccgtattggcatgaaaactaaccactttaattttctctatgacctggagccggagggtaaaaatgttaagatcaagaaacctacaaagatcattaataaggagaccggagagattatcggcgaccgtgacgagctggtcgctaagctgaaccgcgtttataacttcaagtatatgctcatttcccaggaggtgtacacacgcagcggcgccctgttcgatcagaccatctacccagcaaactccggtaagaaactgatccccttgaagcagaacaagactaccgctatctatggcgggtattccggctctaaggcggcctatatgtctattatccgtctgagggacaaaaagggaggcacctatagaattgtggggatccccgtccgcgctgtgaacaagctgaaccaggccaaaaagaaatccaacgagaagtacctcgccgaactcaaagccgtgatcgagccgcagattgctaagacaaaaaaggataggaagaccggacagcgggtcttggtgccacaggaattcgacgtgattatccctgaagtgatgtaccgccagctgatcgtggacggtgaccagaagtttaccctgggctcctctacttatcagtacaacgcccgtcaactggtcctggattctgagtctctggtcaccctgtccaagaactttatcgagagcaacagtgtcacctctgagattaagaataacaggctgatcaaggtgtacgatgacatcctggacaaggtgaacaagtatttttcactgtacgacaagaacaagtttaggcagcgcctcaacgagggccgcgagaagttcatccgcctgcctatcgactccaaattcaagaataacaaaaagatcgccgtgggcaagcgggagatcctgcagaacatcctgatcgggctgcacgataatgctggcatgggtaacctgaaagttcttggcatcaacacccccttcggcatgatccagacttccaatggtattactctgtctcccaatgcctgtctgatctaccagtcacccactgggctcttcgagcgcaaggtttacctgaataccatttctagcctcaag

SEQ ID NO: 758 - DNA, 3453 bp, synthetic construct
  source 1..3453: mol_type = other DNA
  misc_feature 1..3453: note = Human codon optimized LPG10191
atgcagattgacgcccatcaaagctgcgatatgcagaacgataagccttacgtgatcggcttcgacctgggggacttttccgtgggcatgtccgccattcagatcgactcagaaggcctcccaaccaggatcctcaatagtcagagtgttattcacgacagcggaatcgacccttctcagcgcaagtacggaacctctcgcaaaaaggaggcgggcatcgctcgtcgcatcagacgcatgcggcgctacagaaagcaccgcctgaacaagctgtcccagattctctccaccaatggctataagagaatgaacatccgccagttccacggtcccgatatttggctcattagggcgagcgcagcggatcagtacatcgccgatgaagacgccagacgcaccgcaatcagggtctcctgtgagcacatcgcaaggcacaggggatggcgcaatccttaccagaacccgcgtgttctcctgcacgcccagcccgactctgcaacctacgagcagctgcgcgagaacgcagcggatcatatgggtggggttatgccggccgacaacgaaacacccgcccagatcgtgcgcgacgtcctggactaccacagaggggagccggcaatcaggctgcgtcataccggtaaggtaacgcgcaagaccaaaaagaatcagcacacaccatgtgcctgggtgctccctgagcgcatgatgcagtctgacaacgcctatgagctgcggcgtatcctggagacccaacaggtccccgagccgctcatcgagcagctgattctggccgtgttttaccagatcagtcctaagggcagtgccgaacatcttgctggtaaggacgctatcgaccctaccagggtacgtgctcctaagtgctccctggccttccagcgctacagaatcgcagacgtcatctccaacctgagagtcggcatcgagcagcgtagactgactgtcgaggaaaagcaggccatcgccaggttgctggccagcgacaacaaacagacatgcgaatatgagacctgggctgccgtggccgaaacgctgggccatcctgctacatggctgaagggaatcggcgagccagctcccgacggcgaagggaatgtaactaatcgtcccccgcacattgacatcctccatcgcatctcccaactggatgacaacactctgcgcgtgactctcctgaactggtgggattcccataccacggaggacaaagagtcctttatcagagttctgtcaaacaccgtcaatatcgaaaccgtggccgatgaccctgcttataaagctgcccttcaactcctggatggcctggatgacacccagctcaacaagctcgatgctatgaacctggagagcgggcgcgcggcctatagcgagaacaccctgaacaagcttgcggattggatgctcacccatgagggtgatgtcaccgacgcgcgcgagcaggtgttccacatcgctagagactggcgtcctccccaggagccggtcggagctccactcggaaaccctccagtagaccgctctcttaagatcgccgctaggtggcttgatgcaattgagcagaggtacggaaagccaatctccgtccaggtagagcacaccaggaaggctttcactagtgtggagacccgcatgaagaaccagaaagagtggcaggactcctctcgctgtaaggctcgtcaggctttgcgcgaacaattggccaagcagggaggcagcatcagcgaaaacagcctgatgaggcgcgaggctattacccggcagaacggagagtgtttgtactgtggagccagcatcgacatcactacctgtcagatggatcacatcgtcccccggaaaggctctggttgtaccaacaccaaggataacctggtggccgtgtgtcccacctgcaaccaggaaaaaagcaacatgcccttccctgcttactgtgcaaccgaatccgctcgcatgcgtggagtgagcatgaaggacgccattcatagagtccaccatctgaacctggatgaccagggctacaagtctaaggcgcagaaggcgctgaaagacggtattatccgccggctcaagcaaacagaggccgacgatcctatcgatggccgttccttggaatctacctcctggatggccgtggaactgtataagcgcctgacctggcggtacgctcataacggcggaacccccgtgactgtcaatgtctacagaggggagctcaccgctgaggccaggtctatcatgcgccatgcggccggaatggatttccacatgatcggtggccacggcaagactcgcctcgatcgccggcatcacgcgattgatgcctccgttatcgccatgatgactccagcggccgctcaggcgatcgcagcgcgtatcagcatgcacgaggcagaaacactgaccggcatgcgcacggactggagaacctaccctgccaacccgacggccaagtatcaacactggcttgagagtatgaggcgcctcatgaaccttctgaacacagccttggatgacgatcgcatccgcgtgttgcgcaatcagagatacaggctgggcagcagtgctgcccacaaggataccatcaccccacttacctacagggaactgggggatcccctcgacgcctctctgatccgccatgcaagtacaccagccctctacacagccctgacccacctccccgattataacgatgctgatggactgcctgctaaccccgagagacgcattaacgttaacggaactatcattgactccgatgacactattgccttctttactggtgacgcggctcagattctggtgaacgacggtggagctgccgtgggttcatccattcaccatgctagagtttatcgctattacactctgcttaaaagcggtaagcgcaagtacgcctacggctggattcgcgtgtatcagcaagacctgatccatgcccacggcgacctttttaccgaaccactgaccgcctgcaccctctccttgcgctatgccgaccagactctggtgtccgctatcagagacggccgggctgaatacctcggacatctgctcgctggcgacgagattgttgtggactttactgacggtaagggcgctgtagggaagttcaacgagttctttgcgaaagacatccgcgagcagccaagtgcaatgcgcagatggaccgtcacaggctttcccacactcgtgcagacctctctgcggccgtgttaccttagcggcgaaggcctggccaagctggaggaaaggggaggcgagcctgtgcctaaggaggttgagaagattctggctggttccggcgggtacactccttccgtaaataccgtgttcagtctgcaccctgccatcattcatcgcaacgtgttcggcgaggaaagatggggcaccgtgtctggactgcctacctcctggcgggtgaatgacacccagaag

SEQ ID NO: 759 - DNA, 4059 bp, synthetic construct
  source 1..4059: mol_type = other DNA
  misc_feature 1..4059: note = Human codon optimized LPG10194
atgaggaagaaccaggaaccttataatatcggtctggacattggcacgagctccatcggttggtccatcatgaacgataacttcgacctgatgagagtcaaggggaagaaaggcattggtgtgcgcctgtacaacgagggccagagcgcggccgagaggcggatgcatcgtaccgcaagacgccggtacggccgtcgcaagtggcgtctgagactcctggaggactttttcgacgagcatatggccgaagtcgatgacacctttttcgcccgcctgaaggactcttccatcagccctaaggacgataaaaagtacagaaaatctctcctgtttcccaagagcaaaggtttgacctaccaggatgacggtgagttctataaaaagtatcccacaatgtaccacctgcgttatgcactgatgaccgagcaccggaagttcgacctgcgcgaaatttacctggcgttccatcacatggtgaagtaccggggcaacttcctgtatgatactagtgtggactctttcgaggcaaaaaacctggacatcaagggcaagtttgatgaaatcaacgacctcctgtccagctacacagacttctacgtagacaactccaacgccgcgctggtggagagtatcctgctcgagaagaacaccactcgcaaagacaaggctaaaaagatcgcaaagctgttgcacgtcgaggacaaggagaaggttaagaacaagaaagcaaaggacctggccacccagatctctaacgctgtgctgggactgaaatgcaacttccacctgattttcgaacttcaacagaagtattctttcgacctgtgctccgagaagaccgaggaaaacatcgctaatctttcagaggtgctggatgagaatcagaaaatgctcctgatgatcctcaaagaaatccaggatcaggtgatgctcaacgccttcgtgccatctggcatgtccctgtccgaggctatgatgcagaagtacgacgcatacggggagcagctcaagatctaccacgagctggagcacagcgtctctgatgactccgctgcggaactgaggggagcatattgcgactacaatgacaacatcgcaaaacgcgacgaattctataataagctgaaaaagatcctgtccgatatggacaaggagaatgtggagcaggacgttctggagtcctgcggcaagctgaagaaactcatcgacgagaacaagttgttcatccgtcagcgtaccgccgctaacggcgtgttgccccaccagctgcaccagatcgagatgcgcaagattatcgataaccagaaagagtattacccttggctggcggaacctaaccccaatgagaagcgtagagtctattccaagtataaagtggaagagctgattgctttccgcatcccgtattacgtgggccctctggtggatccaaacaatgctgacaaaaataaggaagctaggttcagctggatggtgaggaaaaaggatggcgagatcaccccctggaacttcgatgacaaggtggatagggctgagtccgccaataacttcatcaaacgcatgaagtccaaggatacttacctgctcggtgaggatgttgtgccaaaagagtctatgctgtatcagaagtacgaggtgctgaatgagctgaataacttgcggatcaacgactccgggctgtccgacagtttcgaagacgtgaaactgaagcaggccatctacaatgatctgttcaaaaagcagaagatcgtgaagattactgatttgcagaactacctggtgcagaaccacaagtatctggtgaagcccaaaatcagtggattggcagatgagaatcgctttctgtcatctttgtccacctactctgatctgaaaacaatcttcggcgacaaggtggatgaccggacctatttcaacgatttcgaaaaaatggttgaatattcaacggtgtttgaggatggacacgtctataaacaaaagctcgacgaatttacctggctgaccaaagaagagaaagataagatcggcaaaaagcgctatcgcggctgggggaagttgagcaagaaactcctgaccggtctgcgggataagaacaatcatactatcatggacaacctgtgggagaccaacaggaatttcatgcagattcagaccgctgatgagtttccaaagcagatcagcgaagagaatgagagacatctgaagggcagcgtgtccgatgctatcaacgatatgtacacctcccccgcaaacaaaaaggccatccggcaggtgctgcgcgttgtggatgacatccaaaaggccatgggttatgccccgtctagcatctctctcgaattcgctcgtgaagacgggcctagcgtgcgcactgtgagcagggctaatcgcatgaagagtatctacgagaagtatgcatctgaggtttcagaagaggtgatgaaggacctggacggcgttatcaaggataagaaaggactcaatgataggctctacctgtatttcgagcaacagggcaaagacatgtacagcgggcatcccctcgacttcgacaaggtgatctccggtcaggagtatgacatcgatcatatcctccctcaggccgtgatcaaggatgactccctggacaacagagtcttgaccacaaaggcgctgaataacgacgtgaagagtaaaggcgtaccctgtcgcatgttcaatggtatgcactccttctggaaaaacctctatgacaagggctttatcagcaggagaaagtttaataacctgacgaccaatccggagaacatcgacaaatataaaatgaagggctttgtgaaccgccagctggtagagacacggcaaattatcaagttggtggccaacgtccttaacgacaaataccagaacgatgacgtggatattatcgaggtccgcgcagagctcactcatgacgtcaggaagcacttcaagttctacaaaaacagaaacgtgaacgactaccatcacgcatttgacgcctatcttaccaactttgtgggccagtatctctttaaaaagtaccccaacctgcgccctctgtttgactacaatgacttcatgaaggtgagcgataacgtgttcaagcagctgcgcggcaacaattttctgggcgagtttctgaataagaccggcgatattatctctaccgacgggaatttcgtgctgaacaaggaagagatgatcaacaaactgaacaaggcgtacgccttcaaaaagatcctggtgactaaagaggtagtgcagcgcactggtgccatgttcgacgagaccgtctacagcgctaagtccggcaaaactctgatcaagctcaaaaaggacagggacacctccatctacggaggccattccggaaacaaagacgcttacatggtgatcgtatacaccggcaagggctacaaggtgattggtatccctgttcgttacgctgagcgtctggacagtttgcgtaagaacgacgtggatggcttcaatgacatgctgaatagactgatcgagagtaaattcagcaaaaagtccaagaacaagcagtttcgcatcgtcatcgacaaggtgctctataatcagctgattcaggacggcaacctgttgttcaccctgggttcagcagcctaccagcataactttaggcagctgtttctggacaagaaagcattggagatcctggataaggtcgccacgccaaagcccactgacgatgacctgattatggtatatgaccagatccttgagagggtcgacaagtactttgagctgtacgacaatggaggctgccgcgaagccttgcataagggacgcgagctgttctgcaagctgcccgtctccaaaaggaacgaaaaggacgtcaccaagagggacatgatttataccatcttggacggcctgcatgccaacggaaagaccgtgagctgtctcgagattggtaagggaggcgctttcgggaaatttcagaagcagaacgggatcaatctgtccgagaatgctaagctgatttaccagtctccgactgggttgtttgagcgtgtcgtgtatctgaaagatctc

SEQ ID NO: 760 - DNA, 3171 bp, synthetic construct
  source 1..3171: mol_type = other DNA
  misc_feature 1..3171: note = Human codon optimized LPG10195
atgtcaaaccgggtgccttacagactggccctcgaccttggtaccaacagcatcgggtggtgccttctcgatttgaacggcaacggggacccgtgcggtgtgcggcgcatgggtgtacgcatctttcctgacggccgggaccctaagtccaaggaatccctggcagccgatcgtcgcctggcgcgtagcatgagacgccgtcgcgaccgctacctccgtcggaggtccgccctgatgaacgccctggttgccgctggattgatgcctgccgatcaggcgggccgcaaggccctggaaagcgaagacccctacgagctgcgcgctcgtgccctgaccgagccgttgactgctggtcaagttggaagggcccttttccatctcaaccagcgtagaggttttaaaagcaatcggaaggcagccggagaagagaacgaggcgggaaagatcaaggccggcatctccgcactgaaggcggaaatcgaggcgagcggggagaccactcttggcgcttggctcgccgcgcgccaccgcaagcgcgagactgttcgcgctcgcctggatggcgccggcgcaaaagccagctacgagttctatcccgagcggagcctggtgcatgacgaatttcaggctatccggaccgcccaagcgccccatcacccagatatcactgcagagcagtgggaccgtatcgagtccgtcatctttaggcagcggcctttgcgccccgtgcgccccggaaagtgtactctctttcctgaccaggagagagccccatgggccctgcccgtggcccaggaattccgcatcctgactgaggtggggaacctgaagctgtaccgtcccggcgaagagccccgtgagcttagcgctggtcaacatgcccagctgttcgctaagctgtgcaggtccgctgacctgacattcgaaaagatccgtaaagagctcaagctggaccccggactgaaagttaacctggagggtgagaagcgcgatcgcctgaagggtgacgcagtcacatccgctctctctgccaaaaagaggtttgggcccaagtggaatgccctcacacccgatgaccgccgtgatatcgtgggtcgtctcatcgaggcagaggacgaggcggagctcgccggctggctggagagcgtacacggcctggcgagtgagaacgctgcccacactgcggccagccccggactgcccgacggttactgccgcttgtctgagaaggcgctggtggagctggtcccactcatgcgcgagagactgttgaggtacgatgaggcagttcgcgccctggatttgcatcactccgacttccgcccggatgggttgctcgacgagcttccatattacggtgagccgctcgagcgcttcattgctttcggatctggcgaaccgtccgatcccccagaactgagattgggcaggttccccaaccctactgtccacattggactgaacgagctgagaaagttggtgaaccgcatcgttgagcggtggggtaaaccagcagacatcgtagtggaactcgcgcgtgacctgaaacgttctcgggatgagcgcgataccattcagcgcgagcaggcgcagaaccagcgcaagaacgaagatcgcttcgccaagattaaggaacttgggatcgacccaagacctgactccatgctgcgcctgcgcctgtgggaggaactgccaaaggtgggcgtcgggcacgtgtgcgtgtacacgggggagcctattggaatcagacgcctgcttgagggcgacgtcgatatcgatcatatcctgcccttcagccggactctgtctgacggcgctgacaacaagatcgtttgcgtacgtagagccaacaggtttaagcgcgatcggagcccctgggaagcacttggcgtgacggccgtagatgggtactcctgggcagccatcgccgagagggcggaggaactgcctaagaataagcgctggcgcttcctgcccgacgccatggacaggttcgagggcgaacggggctttctggaccgccagctcgtggagacgcgtcacctgtctagagtggctcggcagtacctggcttccatcgtggagctgaacaaggtgagggtggcgcctggcaagctcacagccatgctgcgcgcgaggtggggtcttaataaaatcctgtccgatgggaacctgaagaatcgctctgatcaccgccatcacgccatcgacgctgcggtcttgggagtgattgatcagcgcttggtgcaactggtggcacaggccgcggctcgtgcggaggctaacgagctggaacgcctgttcgacggcctccccgaccccttcgacggactcgcagctatgagctttggggaccaggtccgcgagaagatccgcggcatcaccgtctctcatcgtgccgagcatggctggcagggtcgcatgcacaacgacaccgcgtacggtccggtggaggccgtgaacggcgtccacaccgttgtgacccgcaaacccctctctgggctgacagctaaggaatttccgaacatccgggatcgtgtgctggccaaggccctggaggatcacgtggccgcagaggctgccgctggaagaggtttcggtgatgctctgggcagcttcgagtggggagggcagccagtacgtcgcgtccgcatgctcgacgtcctgggaaaccccattcctatccaggatccctccgggaccgtgtttaaggtgtataagggagatagtaatgcttggtacgaaatcctgagggacccccgcgggcggtggactgggaagatcgtgtccacctttgaggcctatcgcctgcaccgcgaatggctggccgagactgggggcgactccggtcgcggtgggggtgtcttcctggactgggcggctaagcgcgtggccggggaggcagggaccccgctctttcgccttttcaagggcgacttgctggcacttggcgaagcgcccgatcgtcgcattgtgcgggtagtgaagttttccgagggtcaagtggcactggccctgcacctggaggccggcaacctgaaagcccgcgatgctgataaaggagaccccttcaagtatcagtactgtagcccagatagcctgagaaagcaggcggcccgccctgcaggcgttgaccttttgggctacgtgcacgacaaaggccctctggag

SEQ ID NO: 761 - DNA, 3186 bp, synthetic construct
  source 1..3186: mol_type = other DNA
  misc_feature 1..3186: note = Human codon optimized LPG10196
atgagcaaggtgctgggactggacattggcatctcaagcgtgggatggggcattatcgacagccagagcggcgagattatcgacgccggagttcgtttgtttgaagaggccacccgcaacgccaatgaggacagaaggactttccgtggctcccgtcgcctgaagcgccggcgcacgcacaggcttgagcagctgaagcagttgctgactgaggttggactgcccctggaaagcattggcgttgagaatccttacgaagcgcggcgcgatgccatttatggagaagtgaccaaggagcgcttggtggccgctatctatcacctggtgaagcgtagaggggttgtgctggatgcacccgaggaagagtccaaggtagtcaacgaactctccaccaaggaccagctggctaagaatcgtaagctgctcgagaccaagtatatttgtgagatccagctggagcggatcaacgactctcacgagaagatgcgcaaccacgagaaccgcttccgtacagcagactacgtcatcgaggctaaggcaattctggctaagcagaaggagttccacgaagagctggccaacgagttcatcgaaaaagttatcaacctgatcgagcggcgcagagagtatttcgatggcccgggcagcgagaagtcacccaccccttatgggcagtacttcttgaacaaacagggcaagctggaaaacgtgtccatgatcaacaagatgcgcggtaaatgtacttacttccctgacgagctgcgcattcctaagatgtcctatacggccgacctgttcaatctcctgtccggcgatctgaataagctgcagatcgagggagagtaccttactgtggaagacaagaactacatcctcgaaaattttatccacaaggggaagaacatcaccctgccacaacttctcaagtataaaggcgtcgactctgatgcagtcgtgaccggctaccggatggatatgaagactgacaaaccaaccttcactgacttcaagggctacaagaatatcctgaagatcgtgaaagagcacgacctgcccatcgaccttctccacaattacgacgtgctggatgagattgtgaacatcttgactgcagagaagagctacacccgtagggccgagcaaatgaacgaacttttgacaatgtacagcgacactgccagacgtaagatcgtgactgctttcaaggagagtaccgattttgtgggctatcacgccctctccaaaaaggccatgatgctcatcctgaacgagctttgggccaccaacaagaaccagatggagctgttctctgagctgaagctggaagagaagcgggtgtccgggctgactaaaacaaagaatatccaattcgatgacgatgctattctgagcacagtcgcgaagcgcgcccaccgtgagaccatcaagatcgtcaatgaggcccgtaagaaatacggagagttcgagaccatcgtcgtggagacagcacgggagaagaactcagacgagaagaggaagctgtatgttgatttccagcgcaatattggtaagctcgagaagaaaatggccgacctcctgtctgtgaagaacttgaaagacctgagactgaacggcaagcagcacctggccctgaagctctgggactcccaggacggaaagtgtctctacagtggtaaggccatctccctgcacgagatcgtgactaacccgaccctgtttgagatcgaccacatcctgccaatctctcttagtttcgatgacagccaagcaaacaaggtcctgtgctatcacgctgaaaatcagaaaaagggtcaactgaccccttttcagtatttcatgagcgggaaaacgaaccgtagtttcgaccagttcaaggtggaagtgcttaacctgtataagtctagacgcatcacaaacaagaaaaaggattacttgctggaacagcgcgatctgcagaataacgaagagcttcagaagcagtttattaaccgcaatctcgttgatacccagtatgcgatgcgtagtttctctatgtccctgcgcacatacttcaaagccaacagtatcgacactaccgtgttgagtatccgcggttccttcactgcggccttgcgtcggcgcgccagactgaacaaggaccgtgatgaatcttatgcccatcacgctatcgacgcactgattgtcgcagccatcggtaagcttccagtatttgagtttttcaaggaattcggcatggacgagcagggcattatctacaacaaggaaaccggcgaaatcttgggtgaggatcagtttttcgagcacaagttcatgaagctgctccgcgatttgatgaattacgagtccaacatcaggtatagtcacaaggtcgaccgcaaaggcaatcgcacgatgagcaaccagaccatctacggaacccgcgaaaaagacggcgagcgctattacctcggcaagagcgataacatttaccagctcgacaagaacggcgtggctccgctcctgaagcggcttgccaagtccccggattctttcctcatcgctgaacacaacccggaactcttctccctgatcggcaagatcgtcaaggaatacccgacggcggacaaccccttcaaggcctactataacgaacatggttacatcctgaaagatgggaaggttccagtgaagatccttcgttaccgtgaccggaagctgggggtgcacatgaacatcaccgacaagtatccgggcgccaagaacgatgtggttctgctttctatcaagggcgtgcgcgtggatctgtataaaaacgccgagggaaactataagtacctgggtgtgccctataactggttcaaacaggtggggaaccggctgatgctggacctggaaaaatacgagaaggagaaaaagcagtcatacaaaaagatcgatgacacatatgagtttcaaatgtccctttacaagaatgatctgttctctttcgagaaaggaggcaagtacgccgagcgcatcttccgcggagatagcatgccacggcagaacaaggtcgaagtcgattacgtattcaagcgcaaggaagagcagaaagagggttttctcgccccctctaccatttccaacgtcatcaaatataacgtggacgtcctgggcaacagacataagatcctcaaggagatcttcaacatgtatctgcagaagtga

SEQ ID NO: 762 - DNA, 3234 bp, synthetic construct
  source 1..3234: mol_type = other DNA
  misc_feature 1..3234: note = Human codon optimized LPG10197
atgaagtattccattggtctcgacatcggaatcgcgtccgttggctgggccgtaattaatgaggacatcgagagaatcgaagacttcggcgtacgcatcttcgatgcagctgagaacccaaaggatggtgcgagtctcagcacccccagacgcgaggcgcgttcaactcgcaagaggctgcgccgtcgccgtcaccgcgtggaaaggattcgccagcttattatccagaagggactgttgacccaggtccagatggagcaactgtacgactggaaggcagaggatctggacatctggctgatccgcgtgaacggccttgaaaggaagctgaccgatcgcgagttcgcacgcgtcctgatccatctggccaagaaccgcggcttcaagtccaaccgcaaaagcgagctgaaggagggtgacaacggcgtagtgctgtccgcagtgcaggagaacaagcagctcatggaggaaaaaggttatcagaccattgccgaaatgcttctgttcgacgagagatttgacggatgtaaacgcaacaagggaggcgcttacagccacgttgtggctagatccgatctggagcacgagatcaggttgatcttccagaaacagcgcgagtacggccacgcttttgccactatcgagaacgaagaggggttcgtgagcatctgggcatctcagcggcccttcgctacgaaggacgatatcgccaagaaaattggttactgcactctcgaacctaaggagaaacgcacccccaagagcacttacacctttgaacggttccgcgcaatcgacaagctgaaccgcctgcgtatcctctctagcacaattccttcccgcccgctggtgcaggaagagagagatgacgtgttgaacaccctgttctccaaaaaggaagtgaagtacaaagaactgagaaagttgctgaaacttaaggatgccgagcggtttaacgagatctattacgatcccaacgagtccaacgagaagaatgagaaccgcacattcctgagtctggagagccagcacaaaatcagaacaattatcaagcaggtcgaggggaagaatattaatgattcctatagacctatcgatctcgatactttcgcgtacgcactgaccgtgtttaaggacgatcaggacatcagagactatctccagaaccgctacgtctcatccaatggcaaaaaggtgctgaaccttgcaaaccttgagtacaaggaggaactgatcgaagagctgctccagctgtctttcgccaagtttggtcacctgagcctgaaggcactgaaaaacattctgccctacatggagcagggaatgccgtaccaccaggcctgcgccgaggccggctacgagtttaaccagagggttaataaggagaaacagtaccttctgcctgtgattccgaccaaggatatcgctaacccagttgtgatccgctccctgagccaggtgagaaaagtcgtgaacggcattatcaaaaagtatggtagtcctagtgccatctacatcgaactggctcgcgagatgggccgggtctacaaggagcgtaaagaactggaaaaacagtacaataagaaccgcgagatcaatgagggcgccaaaaagcacattgttgaacttcacccgcagctcggtgacccgcgtggacatgacatcctgaagtacaagctgtggaaggagcaggatgggcgctgcgcttattccttccagcctattagtattgagcgcctgttccacatcggatacgcggaagtcgaccacatcattccttattcccggagctttgacgattccaattccaacaaggtcctggtgatcgcagcggagaaccaaaacaaacagaacaggactccctacgagtggtttggccacaacgagacaaaatggcaggagttcactagctttgtgacgaccatgaaggtgagcaaaaagaaaaagggactgctccttaagaaagacctggacgaagagcaggcagaggaattccgctcccgccacctgaacgacaccagatacattaccagattcatcaagacctttatcgaagacaacctcctgttccgcacggaagagtcccggaagcaatacgtgcatactgtaaacggcgcgtacacttccctgatgcgcaagagatggggtttcaacaagaaccgtcaggagaacgatttgcatcacgccctggatgcagtgattatcgccgtcagcctccctttcaagcaccgcgtgtctgcctatttcaaacgccgtgaggaatacgctcacaaccagctgaaacgggaaggtgagttctttcccgaaccctggccgggtttcatccatgagctcgagatccgcatgatgcaagactctgaaaaaatgaagctggcaattgagtccctggacctcaaaacgtacaacgagtccttcatcaacgagctgaagcctatttttgtgtctcgcatgcccaagagatctatcaaaggtcagatccacgaagagaccctgaagcgcgtgcgcggcctgaccgagaccggctacattctgaccgtgaagaaaacccggctggaccagatccccttcgacaagaatggtgacttccctatgttcggcaaggaaacggacatgaagacatatgaagccattaagaaccgctacctggaattcggtaagaacaaagaaaaggccttttcaactcccctccacaagcctgcgaagaaccctaataacgctcctattatcagatcagtgaagatcgagaacaaaacaaacagggttgtgatgctcgatgacaagaccgccgcagacaacgccagtattgtccgcactgaggtgttccgtcacaaggagaccgggaattactttctgacacccgtatatgttgctgacgccctgtctaaacgtgtaccggatcgcctcatcaccccaaaaaagccatattccgagtggaagagaatcaccgatgactacgaattcctgttcagcctttatcccaacgacctgatcagggtgaagatgcctagggagaaggaggcgaagacccacgcgggcgaaaagtgcctgtggcaggagaactttgtgtattttaagggtgtggattccgctgacgctcgtatcaaagtcgtggatcacatgaactccttcgaggaccgcgtcggtacacagcgcctggtgaccttcgaaaagtatcaagtcgacccgctgggaggcatcaataaagttcacggggaaaaacggtacgggttctaa

SEQ ID NO: 763 - DNA, 4467 bp, synthetic construct
  source 1..4467: mol_type = other DNA
  misc_feature 1..4467: note = Human codon optimized LPG10198
atggccaagcagaaatacacggtgggactggatatcggtaccaattccgtaggttgggcggtgatcaatcaggactttaagctggtgagcggtaaaaagcacatcaatgacaacgggaagcaaaagagatccaggactaacctgtggggtgtgcggctgttcgacgccgcagagacagccgaggacagacgcctcaagagaggtatgaggcgtcgcatcgctagacgtaaggagaggctgaactatcttcgcggcattttccaggccgacattctcgccttcgacgattctttctttattcgcatggacgaaagcttccttcaggacgatgacaagcaggctaccgcctttagctatcgcgatcagtctggggccatgcaaactagggttgtgaccgaaaaggaagctgtgaagtacccactttttaacggaaagagtggctccggtgagacatacacagacgagtccgcatattacaatcagtacccaaccatttaccatctgcgccagcgtttgatcgacaatcctgcccaggccgatctgagactggtctacctggcaatgcatcacattctgaaataccggggtcactttgtgaatcaaggccaaacattcgacctcggaaacatcaacatcgccggtaacctgactagtgcccttgacaaactggatgaggcatctagctttaagttcggcctcgccgatgtggatgccgaccaggctaatgcaatcctgaagaacaagcagtggtccgcctccaaaaaggcctatgagctcaatgctctgttcgagattatccaggatactgtgtaccggcgcgagaacgagacccaggcagtcacttatgatagcctgacggttaagcaacaggaaaagtggctcgctgagaagcagaagcaggtgaaggcctttctcacaggcatcgtgggaaataccatctctcctaaggatattttcgcgaataaagactatgataagaaacaaaacgaagattttcccgaaaaaatcaagtacagcaacgaaaatttcgaggaacagattggggctctggagaagtaccttgacgagactgaggtagctgccattgtggcgggcaaagacgtgtacgagagtctggtactgtccaacattttgacgaagagtactctgagcggcagtatgatcgaaaagtataacgtgcacggtgctcagctgaagtccttgaagtccttctccagaaaggtgagcgcggagttctatgacaagctgttcaacgtcgtgaaggacgaaaaaggtaaaccccacattggcgtctacgctcagtacgtggacggtgtggggaacccggctaaacgcctcgctagggaagacttttacgacgcactcaaaaaggtgttcgagagcgagtttaagggactgacctttcctgttggagagaagggcattgacttcacaaaaactgacctcagcgccgaccgcgtcgccttcatccgcgaaatgaacgaggccatcaacctggagaactacctgccgaagcagcgccaagccgataatggtgaaattccttaccaggtgcacgagcacgagttgatccgcattatcgagaatcaaaagcaatattacccgttcttgggtgataaggtccaggtggcctatgaggacgagtccggccagacacaagttcggtctgaatacaaaatccaggttctgtttaagttccgcatcccttattacgtcggaacactggccaagaacagcggttgggtcaacgaggacgggaagaaactggtcgcacgcaacgtggctgccaagaacagttgggttgtgcgcaacagcgacgagcgggtgaccccttggaacttcgagcaggtgatcaacaaggaggccagctcaatcaacttcattgaacggatgaccaacttcgacacctatctgccaaacgagaaggtgctcccaaagaactctctcctgtaccaggagttcattgtgaataacgagctcatcagctctggctattacctcaatggacgcaaggagtattttctcccagaacagaggcaaagaattatcacaaggctgtttaaacgctaccgtaaagtcagcgcaaagcagatgctggactttttgaagaacgagtaccaaatcaagttggacgatgaccctaaaaagctgttcggactggataccttcgtcaaggtgccgtcctataatggcagcctgtctaccgtggtcgacctgactaaaaagatgggcatttctgaggatctgatcgccaactatccagaacgctttgaagagattatcaagtggcagaccatcttcgaggacaaaaagatccttaaaaagactatccgcgaagtgaaccacaataagtggtccggcatgttgaccgccgagcaggtgaataagctgtccaaacgccactacaccggctggggtcgcctcagtcagaagcttctggacggcgtcaagacatcacagggacggacaatcattgagtccctgcgcgaggggatctgcgataacttcatgcgcttgatcgaagatgagaagatcgccgagttcattgcgaacgcacaggttgcgggtgccaaggatggcgtactggcctacgacctggttgaccagctgccgggcagtcctgccatcaagaaagggatctggcaatccctgcgtgtgctccaggagctggagcactatctcgggagagatgccatcggcaaggttgtcatcgagatgtccagggatgacgaatcttcccgcaggactaaagctagaaaacaacagctcgaggaattttacaaaaagttcaaggagagcaccggatctgacgtgacagccgaactgaaaagggagctgtctgaaaaagacgctaaagagatcgacgatgagaaggtctttctctactttctgcaaaacggcaagagcatgtactccggcgaccaactgtaccttagcagactggccgattaccaggtggatcatattgtgccccagacgtacatcaaggatgacagcctggataataaggtcttggttacccagcgtgataaccagaacaaaggcggtgatacgcccagccagactgtggtaacccggatgaactcttactgggaaatgctggccaagaacggccaggttagtccgcgcaagctggcgaatctgaaaaagggccctatcacgcttaaacagcgcgagggctttattaaccggcagctggtggagaacagacagattaccaaacatgtggctaacatcctgatgaactattacacaggcacagatacactggtcctgaccccaaaatccgggttgacgagtcagctgcgctccggcctgatctatgaactgaacccggcgtttgacgaggccaaggctctggacaggggtaaggcctaccaggtggagagatacaccacggtgaagctgcacgacaggtttgtgaagaaccgtaaactcaacgattatcatcacgcgcatgacgcctatcttaacgccttcgtggctcagtatgtgtaccaggagcacccagagtggaaaaatgcctgggtgtacggcaagtatccccgcaacggtcaggctgacttcggaaagtgggctactcagcgcaagcagaaaagtctgcagcttctgtcttccatggccaacgatgtctggaacctggaagaccccgacaccatggagaagaccatcctgaatagggacgaaaccttcgagcagatgagacagaccctgtgttatcggaacatcaacatcgtgaaaaagcttgagactcagaccggtaaattcggagacgaaagcgtgtataagaaaggaaacaaagccgatcattactccctgggccttaagagaaagtatcccccgcagaagtacggtggcaccaagggtgctatcagcgcagtgacggcccttgtgaaagataattctggaagggtaatccctgtatctatttctgcctccgactacgatagctaccagaacgctagtgataagctggcttggctccttatgaggaaaaagaacatcgcagagattctcgtggcttccctgcccaagtataccaagtacgagctgccttccggagctctccgcctcctggcgagctaccaggaggcccagagcgctgtcgagctgccaatgctcaaccttggtctcatggatgacgaggcgaaggtactgaacctctacgaccagcttgcacaatttatcgctgataataagctcttcacagacaaaaagatcgcactgttgaagggagagatgcgtgccgcttttgacaggctcgaagagttcaaggacaaacagaaggtgatcgacgagcttctgggagttaccaatggcagcaatcaaggtcttcaggctctgaattctatcggcctgggaacctccaaccagcgcctgaagtccgggaacactatgacaaacggggtgacactcatcaacgaaagcgtgaccggactctacctgacacgcactacatataactaa

SEQ ID NO: 764 - DNA, 3255 bp, synthetic construct
  source 1..3255: mol_type = other DNA
  misc_feature 1..3255: note = Human codon optimized LPG10200
atggtcaagctgcagtacgtgctgggcctggatatcggtatcgctagctgcggatgggccgttatcaacaccgagaaggaacgcatcgaggacctgggcgtgcgcatcttcgacaaggctgaaaaccccaaggatgggaaatcactggctacgccccggcgcgacgcccgttccacccgtaggaccctccgtcggaagaaacaccgcatgcagcgtatcaagattctgctcgtgaagcatggcctcctgtcaaagactgagctggatcatttgtacgagagcgccacggagaatgatgtgtgggatctccgcctgaatgctctggagagacgcttgaatcctaaggagtttgcccgggtgctgattcaccttgctaagcggagaggttttaagagcaataggaaggaaaccactctcagcgaatccggccagattctggaaaatatcagtgaaaatcaacagatcatggagcagcaaaactaccgtaccgttggtgagatgatcctgaaggataaaaagttcgagaaccacaagcgcaataaagatggaacctacattggcaccgtgactcgccaacagctgcaggatgaaatccacatgatttttaacgcccagcgcctgtttaagaacaatttcgctactgaagagttcgaatcccactatctggagatttggagctctcagcgcccctacgcttctaaggaccagatcgagaaaatgattggctactgtactctggagcctaaggagaagcgtgcccccaaggcgtcttggtcattccagtactttgtcgccctccaaaccattaataaccttcgcctgatcagcaaggaccgtatcgaagagctgtctttcgaagagaaaaagcagatcatgaacctggcactcgagaagcctatcgtgaagtacattgatatcaggaagctgctctctatctccaacgaccttcactttaataacctgctttacagtacagataccgtggacacgaccgtggagaaccgtaagtgtatcgaactgaaagagtaccacagcatcaacaaggtgtacaagcagatctatggaaaaggcgtgcctaacctcctgcccattgactacgacactatcgcatacgccctcaccatcttcaaggatgacaaagatattctggaatatctccagaacaagtatgtgaatgctaagggcaagcctattaataactcagctaagaaaacttacgatgacatcttcatccaggccctgcttacactgaacttcaccaaaatgggacacctctccttcaaaagcctgaagaacattatcccttttctggaagatgggctgagctacgataaagcctgcgaaaaggccggctataactttaagggcactagctacacggagaagactaagtatttgcccgtcatcccccagaataccaacccggtggttcacagagccctctcccagacgcgcaaggtgatcaacgccattatcaaaaagtatgggtctcccaaggccatccacattgagaccgctcgcgaactctcaaagacatttcaagagcggaaagagatcgactctatgtaccaggacaactctaaaaagaatgagcatgcaatccgtaagctcaaggaactgggtaacattaacccttctggcatcaacatcgtgaagttcaaattgtggaacgagcaggacggccgctgcatgtattccggtaaatacatcgagccccaccgcctgtttgaagagggctacaccgaggtggatcatgtcctgccatacagtcgctccctggatgactcctacaataacaaggccttgactctggggactgagaaccaaggaaaaggtaataagacaccttatgagtttatgggaaacaccagtatctggaacgagtttgagacccgcgtccagtccaacaaaaagatcaacaagaggaagcaacagaagctccttctgcagaatttcagccatgcccgcgagcaggaattcatcgagaggaacctgaatgacacccgttacgccactatctatctcagcagtctgattcaacagcacctgatcttttcagaaagctctagagagaaaaaggtccacaccgtgagcggcatcattacttctcatctgcgtagtcgttggggcttcaacaaagaccgcaaagaggggcatattcatcacgctctcgacgcagttatcgttgccgtgacctctgatcacatgatccagagggtgacaaagtattacaagctgaaagagcttaaccgcaacctgcaagccaagagaatccctttcccggagccttgggaaggtttccgcctggagcttgaggccaggatctcccccaatacccagcaatacttgaagggcatcaggtttaaaaactatgctgatattaaccttacagagatcaagccgatctttgtttctcgcatgccgaagcgcagtatcactggcgaattgcaccaagagaccatccggaagtttattggatacaacgagaaaggcaaggtcctcacaaccatcaagactaagcttgaggatattccttttgatgctaatggggatttccctatgtatggaaaggagactgatttgtacacctacaatgccatcaaggaacgctacctctctcacaaaaaggacaagcgcaaatccttccaggaacccctctacaagcccaccaagacgggagagatcggtccgctgatcaagtcaatcaagattatcgacactcgtaccattgtcaacccagtcaatcagggaaaaggggttgtgtataacagtaagatcgcccgtaccgatgtcttcaaaaagaatgataagtattacctgatcccgatctataccattgaccttatgaagaacatcctgccccagaaagccatcacggccggtaaaggttacgaagactggaccacaatcgaccacagcttcacctttctgttcagcctcttccctaacgacctgatccagatcgtgccgacaaagaaccgtacaatcaaagctaagacgacagtctctaaaaaggaagtgctgcttccctccctgaccgggtactttaaaggggtgcatagcggtaccgctggtattacggtggaaacccacgacggaagcgtgatcgccaacatcggcagcaagcagctgctcatcttcgagaaataccaggtggatatcctgggtcattataccaagatcaaggaagagaagcggattggaatggccacctacaacgacaataaaaagtctacggccttcagctctctttag

SEQ ID NO: 765 - DNA, 3162 bp, synthetic construct
  source 1..3162: mol_type = other DNA
  misc_feature 1..3162: note = Human codon optimized LPG10203
atgaaaaagaactacattttgggcctcgacatcggcatcacctctgtgggatacggagttatcgattacgagacccgggatgtgatcgatgccggcgtcaggcttttcaaggaggccaatgtcgaaaataacgagggcagaaggtccaagaggggaacaaggagattgaagaggcgcaggagacaccgcctgcaacgcgtcaaaaagctgttgttcgactacaacttgctgaccgatcacagtgagctcacgggcattaacccctacgaagcccgcgtgaagggcctctcccagaaactgagcgaagaggaattctctgccgctttgcttcatctggctaaacgtagaggcgtgcacaacgtgaatgaggtggaagaggacaccggaaacgaactgtccaccaaggaacagatcagtcgcaacagcaaggccctggaagagaagtatgtggccgaactgcagctgaaccgcctcaaggctgaaggggaagtccgcggcagcatcaacagattcaagacgagtgactacgtcaaggaagcaaagcaactcctgaaggtgcaggaaagctaccaccagctcgaccaatcctttatcgatacatacattgaccttctggagactcggaggacttattacgagggccccggtgaggactctcctttcggttggaaggatatcaaggaatggtacgagatgctcatgggccactgcacttatttcccagaggaactccgctgcgtaaaatacgcctacaacgcggatctgtacaatgctctcaacgatctgaacaatttgatcattgcccgggacgagaacgagaaactcgagtattacgagaagtttcagattatcgagaatctgtttaagcagaagaaaaagccgaccttgaaacagatcgctaaggagattctggttaatgaagaggatatcaaggggtaccgcgtgaccagtacggggaagccagagttcactaacttcaaagtgtaccacgacatcaaagacatcacagctagaaaggaaattcttgaaaacgccgagttgctgaaccagattgcagagatcctgaccatttatcagagctccgtcgatatccaggaggaactcgccaagctgaacctcgagttgactcaggaagagattgagcagatttccaagttgacgggatatacgggtacccacagtcttagcctgaaggctatcaacctgatcctggacgagctctggcacacaaacgacaaccagatgaccatttttaatcggctgaagctggtacccaaaaaggtggacctgagtcaacagaaggaaatcccaaccactctcgtggatgactttattcttagccctgtcgtgaagaggagcttcatccagtctatcaaagtgatcaacgctatcattaagaaatacggcttgcccaaggatattatcattgagttggcgcgtgagaagaattccaaggatgcgcagaagattatcaacgaaatgcagaagcggaatcggcaaaccaacgaacgtatcgaggaaattatcagaactaccggcaaggaaaacgccaagtacctgatcgaaaagatcaagcttcacgatatgcaggaaggaaagtgtctgtattcactggaggcgatccccttggaagacctcttgaataacccattcaactatgaggtggatcatattatcccacgtagtgtatctttcgataattcttttaataacaaagtcctcgtgaaacaggaagagaatagcaaaaagggcaatcgcacaccgtttcagtacctcagctcctctgattccaagatctcctatggcacatttaaaaagcacatcctgaacctggcaaagggaaaagggcgtatctccaagaaaaagaaagagtacctcctggaggaaagggacatcaatcgtttcagtgtgcagaaagattttatcaacaggaacctggttgacacccgctacgccacccgcgagctcatgaatcttctgcgctcttacttccgcgttaatgatctggacgttaaggttaagtccattaatggtggcttcaccagtttcttgaggcgtaagtgggagttcaaaaaggagcggaacaagggatacaagcatcacgctgaagacgccctgatcattgccaacgctgacttcatcttcaaggagtggaagaaactcgacaaagccaaaaaggtgatggagaaccagaccgtcgaggacaaacaagccgaatcaatgcctaagatcgagactgagcaggagtacaaggaaatcttcatcacccctcaccagattcagcacattaaggatttcaaggattacaagtacagccatagggtggataaaaagcccaatcgggagctgatcaacgataccctgtacagcactcgcaaggacgataagtccaataccctcatcattaataacctgaacggcctttacgataaggacaacgataagctgaaaaagctcatcaacaagtctcccgagaagttgctgatgtatcactatgacccacagacgtaccagaagctcaagctcatcatggaacaatacggtgacgagaagaatcccctctacaaatactatgaagagacgggcaattatcttaccaagtactctaaaaaggacaatggaccggtgatcaaaaagatcaagtactatgggaacaagctcaacgcccatctggacatcaccgacgattaccccaattccaggaacaaggtggttaagctgagcctcaaaccctaccgttttgatgtgtatctggacaatggggtgtacaagttcgttactgttaaaaatctggacgtgatcaaaaaggagaactattacgagatcaactctaagtgttacgaaaaggcaaaaaagctgaagaaaatttctgaccaagcagagttcatcgcgtcattttacaacaatgacctcatcaaagtgaacggagagctgtatcgcaccatcggcgtaaataacgatctgcttaaccgtattgaactgaatatgatcgacatcacctacaaggagtacctggagaacatgaacgataagcgtccacctcgtattatcaagaccattgcccgcaaaacccagagcatcaagaaatattccaccgacatcctgggtaacctttacgaagtgaagagcaagcagcacccgcagatgatcatgaaaggctaa

SEQ ID NO: 766 - DNA, 3219 bp, synthetic construct
  source 1..3219: mol_type = other DNA
  misc_feature 1..3219: note = Human codon optimized LPG10204
atgtccgagctggattaccgcatcggcctcgatatcggcactaacagcattggctggggcgctatcgagctgtcttggaataaagacagggagcggtatgagaaggtacgcatcgtggacaaaggtgtgcgcatgtttgacaaggccgagattccaaagaccggcgcttctctcgccgaaccacgtcgcatcgcaagatctagccgccgtcgcctcaaccgcaaaagccagcgcaaaaaggacatccgcaacctcctggtgcagcacggagtcattatccagaaggagctggacagcctgtatcccctgtctaagaaaagcatggatatctgggacatcaggctcgacggactggatagacttctgaaccactgcgagtgggctcgtttgctgatccacctggcccaacggcgcggctttaagtccaaccgcaagtctgagctgaaagatacagagacgggtaaggtgctgtctagcattcaggtaaacgagaaacgcctgtccctctaccgtacagtgggcgaaatgtggatgaaggatcctgactttaacaaatatgacagaaagcgcaactcccctaacgagtatgtgttcagcgtctctcgtgccgacctggaaaaggagatcgttactctctttgaagcacagcgtaaattccagtcaagctatgcctctaaggatctgcaggagacttacctgcagatctgggcgcaccagttgccctttgcttccggcaacgcaatcctgaacaaggtggggtactgcagcctgcttaagggaaaggagcgccggatccccaaggccacatatacatttcagtacttttcagccttggatcaggtgaaccgcacccgtctgggacccgactttcagcccttcactaaggaacagcgggagattatccttgacaagatgtttcaacgcaccaattattacgaaaaaaagacaattccggaagtgacatattacgacatccgtaagtggctggaactggacgaaactattcagttcaaggggctgaattatgatcctaacgaggaactgaaaaagattgagaagaaaccattcatcaatctgaaggctttctacgaaatcaaaaaggtcgtggcaaactacgcggaacgcaccaacgaggaatttagtaccctcgattatgacgctatcgcttatgccctgaccgtatacaagaccgataaggacatccgtagttacctgaagtccagccacaatctctctaagcgctgttatgatgaccagctgatcgaagagttgctgtctctctcatacaccaagttcgggcacctgtcactgaaggcgacgaactacgttctgccaatcatgcaggagggcagaacatacaaagaagcggctgaccagcttggctacgatacaaccggtctcaaaaaggagaaacgtaacaagtttctccccctcattccggatgagatcaccaaccctatcgtgaagcgcgccctcacccaggcccggaaagtcgtgaatgctattatcaggcgctatggaagtccccattccgtccacatcgagctggcgcgcgagttgtctaagaaccacgacgaaagaaaaaagattgtgtccgctcaggacgagaactacaagaaaaacaagggcgccatctccgtgctgtctgagtatggtatcctggaccctaccggatacgatatcgtgcgctataaactgtggaaggagcagggggagcggtgtgcctattcattgaaggagattccccctgacaccttctttaatgaactgaaaaaggagcgtaacggaagtcctatcttggaggtggaccacgtgctgccttattctcagtccttcatcgacagttaccataataaggtgttggtgtattccgatgagaaccggaagaaaggcaaccgcattccatatacatatttcttggagacaaacaaggactgggagtacttcgaaacctatgtgcgctctaataagctgttctccaagaaaaagcgggaatatctgttgaaaaaggcatacttgccccgcgaatccgaactgattaaggagcgtcatctgaatgacacacgctatgcttccgccttcctgaaaaattttatcgaacaaaaccttcagtttaaggaggtcgaagataacctgcgcaaacgtagagtgcagactgtcaacggcgtgatcactgcccacttcaggaagcgctggggcctcgagaaggaccggcaggaaacctatctgcatcacgccatggacgccatcgtagtggcttgtaccgaccatcacatggtcacacgtgtgaccgagcattaccagatccgcgagagtaacaagagcgtcaaaaagccatattttcccatgccttgggaagggtttcgcgacgaactcctgagtcacctggcgtcacagccaatcgccaaaaagatcagcgaagagctgaaggctggatatcaatctttcgactatattttcgtaagccggatgccaaagcgctcagtgaccggcgccgctcacgaccagactatcatgagaaagggcgggatcgacaaaaagggcaaaaccatcattatcaaaaggctgcagctgaaggacatcaagttcgacgagaacggcgacttcaagatggtaggaaaggagcaagatatggcaacctacgaggccatcaagaggcgctatcttgagcatgggaaaaagagcgagaaagccttcgagacacctctgtacaagcccagcaagagtggtcggggcaacctgattaagcgcgttaagatcgaggttcaaaccaagtcttttgtccgggaggttaacggtggagtcgcgcagaacggcaacctcgtgagagtggatctgttcgaaaaggatgccaagtattacatggtgccaatctacgtgcccgatacagtcttctccgaactgcctaacaaagctgtgacctcatctaagggttacaagcagtggttgaccttggacaactctttcactttcaagttctccctgtatccctatgacctggtgaggttggtgaagggcgacgaggaccgcttcctgtactttagcacacttgacatcgacagtgaccgcttgatcttcaaggacgtgaaccgcccaagcaaacagaccgagtacagatacagtctgaaaaccatcgaggatctcgaaaagtacgaggtcggaatcttgggggacctccgcctggtacgcaaggaaacccggcgcaactttaatcgctag

SEQ ID NO: 767 - DNA, 3216 bp, synthetic construct
  source 1..3216: mol_type = other DNA
  misc_feature 1..3216: note = Human codon optimized LPG10205
atgtccgaactggattatcgcatcggcctcgatattggaaccaactccatcggttggggtgtgatcgagctgttctggaagaaagaccgtgagagatacgaaaaagtaaagatcgtggacaaaggtgtaagaatgttcgacaaagctgagattcctaagaccggcgcgagcctggccgaaccgagacgcatcgctcgtagctctaggcgcaggcttaacagaaagagccagcgcaaaaaggatatccgcaatttgctggtgcaacacggcgtgatcacccagaaggagctggacagcctgtaccccctgtccaagaaagctatggacatttgggacatccggttggacgggcttgaccgcctgttgaatcacttcgaatggacccgcttgctgatccacctggctcagcgccgtggcttcaagtctaaccggaagtccgagctgaaggacgccgagactggcaaggtgctcagctcaatccaggtgaatgagaagaggctgtctctctataggaccgtgggagaaatgtggatcaaggatgcagatttcatcaagtatgacagacgccgtaattctcccaacgagtatgtgtttagcgttagccgcgcgaacctggaaaaggaaatcgtcaccctgttcgaaacgcagcgcaagtttcaaagcccctacgccagcaaaaacctgcaagaggcttacctgcagatttgggcccaccagttgccattcgctagcggcaatgccatcctcaacaaggtgggctattgttccctcctgaagggcaaggaacggcgcatccctaaagctacctacactttccagtatttctccgcactggaccaggtcaataggacccgtctgggcccagattttcagccattcacccaagagcagagagaaattatcctggacaagatgttccagcgcacggattattacaagaaaaagaccgtcccagaggtcacctattacgacatccggaagtggctcgaactggacgagactatccagttcaaaggcctgaattacgaccccaacgaagagcttaaaaagatcgagaaaaagccttttatcaaccttaaagctttttacgaaatcaaaaaggtggttgcaaattacgctgagcgtaccaatgaagctttttctacactggattatgatgccatcgcctatgcccttaccgtgtacaagacagataaggacatcaggtcctacctcaagagctcccataacctcagcaagaggtgctatgatgaccagttgattgaagagctcctgtcattgtcctacaccaagttcggacatttgtccctgaaagccatcaactatgttctcccaattatgcaggaaggccgcacctataaagaggccgctgaccagctcggttatgatacaaccggcctgaagaaagagaagcgtaacaagttcctgcccctgatcccggacgagattaccaaccccattgtcaagcgcgcactgacccaggcccgcaaagtggtcaatgcgattatcagacgctatggcagccctcattccgttcacatcgagctggctagagagctgtccaagaaccatgatgagcgtaagaaaatcgtctccgctcaagacgagaactacaagaataacaagggtgctatcagtgtcctgagcgagtacggtatcctggacccaactggctacgatattgttcgctataagctgtggaaggaacagggtgagagatgcgcctatagcctgaaagagatccctccagatacttttttcaacgaactcaaaaaggaacgcaacggttccccgattctggaggtggaccatgttctgccctactcccagtctttcattgacagctatcacaacaaggtattggtgtactccgatgagaaccgtaagaaaggaaaccgcatcccctatacttactttctggaaacgaacaaggactgggagtattttgagacttacgtgcgttcaaataagctgttctcaaagaaaaagagggagtacttgctgaaaaaggcctacctgccgagggagtctgaactcatcaaggagcggcacctgaacgacacccgctacgcatccgccttcttgaaaaacttcatcgagcagaacctgcagttcaaggaagtggaagataatctcagaaaacgcagggtgcagaccgtgaacggtgtcatcacagctcatttccggaagcgttgggggctggagaaggaccggcaggagacatacttgcaccatgcgatggatgccatcgtggtagcatgcacggatcatcacatggtgaccagagtcactgagtattaccagattagggagtctaacaaaagcgtgaagaaaccctacttcccaatgccctgggagggcttccgcgacgagttgctgagccacctggcgagccaacctatcgctaagaaaatttccgaggaactgaaggctggctaccagtccttcgactacatttttgtctctcgcatgcccaagagatctgttacgggagctgcccacgaccaaacaattatgcgcaagggcgggattgacaagaaaggcaagaccattatcattaagcgtctccagctgaaagacattaagtttgatgagaacggggacttcaaaatggtggggaaagagcaggatatggccacttatgaagctattaagcgtcgctacctggagcacgggaaaaagagcgagaaagcatttgaaacccctctgtacaagccctctaagtctggccgtggcaacctgatcaagagagtgaagatcgaggtgcagaccaaatctttcgtgagggaggtgaatgggggcgtggctcagaacggaaacctggtgcgcgtggatttgtttgaaaaggacgcgaagtattacatggtcccgatttacgtccctgacaccgttttttctgaactgcctaacaaggcagtgacctcatccaaaggctacaagcagtggctcaccctggacaacagcttcatgttcaagttctccttgtatccttacgacctcgtcaggctggtgaagggcaacgaggaccgcttcctgtatttcggcaccctggatatcgatagtgaccgcctgatcttcaaggatgtgaacaaaccctcaaagcagacggagtaccgctacagcctgaaaaccatcgaggatctggaaaagtatgaggtcggcgtgctgggcgacctgcgcctcgtgagaaaggaaaccaggagaaacttccagtaa

SEQ ID NO: 768 - DNA, 3234 bp, synthetic construct
  source 1..3234: mol_type = other DNA
  misc_feature 1..3234: note = Human codon optimized LPG10207
atgaagtacagcatcggtctggacatcggaatcgcgagcgttggatgggccgttatcaacgaggacatcgagcggattgaggacatgggaatccgtatttttgatgcggctgagaacccgaaggatggctcatccctgagcacccctcgtcgcgaggctcggagcactcgcaagagactgaggcgtcggcgccaccgcgtcgagcggatccgtcagtttatcattcaaaagggcctcctgactcaggtgcaaatggagcagctctacgactggaaagccgaggatctggacatttggctgatccgcgtgaacggcctggaaaggaagttgaccgatcgcgaatttgcccgtgttctgatccacctggtcaagaaccgcggcttcaagtccaaccgtaagtccgagctgaaagagggcgacaacggtgtcgtgttgtccgcagtccaggagaacaaacaactgatggaagagaagggataccagactattgctgaaatgttgctgtttgacgagcgctttgagggttgtaagcggaacaagggcggagcctacagccacgtggttgcccgctctgatcttgaacatgaaatccgcctgatctttcagaagcagcgtgagtacggtcacgcgttttccactaccgaaaacgaagaggcttacatcaacatctggagctcacagcgtcctttcgccacaaaggatgacatcgccaaaaagattgggtactgcaccctcgagccaaaggaaaaacgtacaccgaaatccacctatacattcgagaggttcagagcgatcgacaaactgaaccgcctgcgcatcctcagtgcgatcacaccctctagggagctcacacaggaagagagagatgacgttctgaacagtctgttctccaaaaaggaagtgaaatacaaggagctgaggaaattgctgcgcctgaaagacgaacagcgtttcaacgagatctattacgctcctaacgagtccaacgagaaaaatgagaaccggaccttcctgagcctggaatcccagcataagatccgcgccattatcaagcaggtcgagggcaagaacgttaacgattcctatcgccccattgatctggacaccttcgcctacgccctgaccgtgttcaaagatgaccaggacattcgcgactacctgcagaaccgttacgtgtcatccaacggaaaaaaggtgctgaacctggctaacctcgagtacaaggaaaaactgatcgaggaattgctgcagctcagcttcactaagtttgggcacctcagcttgaaggcgctcaagaatatcctcccttacatggagcagggcatgccctaccatcaggcctgtgccgaggctggatacacattcaaccagcgggtgaacaaggaaaagcaatacctcctgccagtgatccctactaaggatatcgcgaaccccgtagtcattaggtccatgagccaggtccggaaggtagtgaacggtattatcaaaaagtacggctctccgtccgctatttatatcgagctggctcgcgagatgggacgtgtgtacaaagagcgcaaagagctggagaagcaatacaacaagaaccgcgaaatcaatgaaggcgccaagaaacatatcgtggagctgcatcctcagctcggtgatcccagggggcacgacatcctcaaatataagctttggaaggagcaggatggcaggtgcgcgtatagctttcagcctatctccatcgagagactgttccacatcggttatgcagaagtggaccacattatcccatactcacgctccttcgatgacagtaatagcaacaaggtgctggtgattgcggcagagaaccagaacaaacaaaaccgcacgccgtacgaatggttcggccacaacgagattaagtggcagaagttcacaagctttgtgactaccatgaaggtgagcaaaaagaaaaagggcctcctgctcaaaaaggatttcgatgaggaccaggccgaagagttccgctccagacaccttaacgacactaggtacattacccgcttcatcaaaacatttattgaggacaatctcctgttcagaaccgaggaaaataggaagcagtacgcccacaccgtgaatggcgcctacacatccctgatgagaaaacgctggggctttaacaagaacaggcaggagaatgatttgcatcacgccctggacgctgtcattatcgcagtctcactgccgttcaagcatcgtgtcagtgcgtattttaaacggcgcgaggaatacgcccacaaccagctgaagagggagggcgagtttttcccggaaccttggcccgagttcattcacgagctggaaatcaggatgatgcaggaaccagaaaagatgaagctcgctatggaatctctcgacctcaagacttacgacgagtcctttattaatgagctcaatcctgtattcgttagtcgtatgccaaagaggagcatcaaagggcagatccacgaagagactttgaaaagggtgcgtggctacaccgaagacggctacatccgcactgtgaaaaaggtgcgcctggaccagatcccctttgacaagaacggcgacttttctatgtttggcaaggaaacagatatgaagacttacgaggctattaagaaccgctatttggaatttggtaaggacaagaaaaaggccttcaactctcccctttataagcctgcaaagaatccagaaaacgcaccaatcattcgcagcgttaaaatcgaggacaaagccaaccgtgttgtgatgctggacgagaagacagccgctgacaacgcaagcatcgttaggacagaggtcttccgccacaaaggcactgggaattactttctgacacccgtgtacgtggccgatgtcctgtccaagaggattcccgaccgtgtcatcactaccaaaaagccctatagtgaatggaagcgcatcacagatgactttgagttcctcttctccctttacccgaacgatctcatccgcgtgaagatgccaaaggaaaaggagacgaagacaaacatgaaggagaagtacgtttggcaggaaaactttatgtatttcaagggcgtgcacagcggctccgccggcgtgcggatgatcgaccacatgaattcttttgaggatgaaatcggggtccagaaattgattatcttcgagaaataccaggtggaccccctcgggaggatcaccaaggtccacggagagaagaggcacggcatctag

SEQ ID NO: 769 - DNA, 3231 bp, synthetic construct
  source 1..3231: mol_type = other DNA
  misc_feature 1..3231: note = Human codon optimized LPG10208
atgaagtactccatcggtctggacatcggcattgcttcagtaggctgggcagtaatcaacgaggaagtcaaccgcattgagaacctcggagttcgcatcttcgacgtggccgagaacccaaaggacggttcatccctggctaccccgaggcgcgaggcccgcagcgctcgcaagcggctccgtcggcgtaggcacagaatcgagcgcacccgccagttcatcgtcaagcagggactgcttacccaggtccagatggagcagctttacgactggaagtccgaggacctggacatctggttgatccgcgtgaacgcaattgagcgcaagctgatggatcgggagtttgcgcgcatcctgattcatatggtgaagaaccgcggtttcaaaagcaatcgcaagtctgagctgaaggaaggagataacggggtcgtgctgtccgctgtccaggaaaacaagcagctgatggaagagaaaggctaccagaccatcgcagaaatgctgttgttcgacgaacgttttgagggcagaaaacgtaacaagggaggcgcttactctcatgtcgtgtctcgctccgagctggagagtgagatccgtctgattttccagaagcagcgtgagtacggccatcacttcgcccgggtggagaatgaagaggtgtttatcaacatctgggccagccaaagacccttcgctaccaaggacgatatcgccaaaaagatcggtacctgcactttcgaagagaatgagaagagagtccctaagagtacctacacctttgaacgcttccgtgccttcgataagctgaaccgtctgcgtatcgtctccactgtggcccctaccagggccctgacagaagaggaaaagagcctgatcctggactccctgtttagcaaaaaggaagtgaaatacaaagaactgcgcaaactcctgaaactccaggacgaacagcggtttaacgagctgtactatgatcccaatgaaaccaatgataagaacgagaacagaacattcctgagtctggagtcacaatacaagatcaggaaggttatccaacaggttgaaggcaagaacatcaatgactcctaccgtcctgtggacctcgataccatcgcatatgcgctcacaaccttcaaggatgaccacgatattcgcgactaccttcagaaccgctatgtaagttcccacggcaagaaaaccgagaaccttgccaatcgtgtgtacaaggaagagctgattgaggaactgctccaactgagcttcagcaagtacggtcatcttagccttaaagcacttaagaacatcctgccgcacatggaaaaaggtatcccctaccataaggcttgtgaggaagccggctaccagttcagcaaaaaggcggataaggataaggagtactttctgcccgttatccaggctaaggacattgccaaccccgttgtagtccggagcttgtctcaagtgagaaaggtgatcaacggaattatcaaaaagtatggatccccatccgccatctacattgagctggcgcgggagatgggcagggtgtacaaggagcggaaggagattgagaagcagtacaacaagaaccgcgacattaacgagggcgccaagcagcacatcctcgagttgcaccctgagttcgggcacccacgcggccatgacatcctcaagtataagctgtggaaggaacaagatggacgctgcgcatactcattcgaacctatctctatggaacgcctgttccatatcggctacgcggaggttgaccatgtgatcccgtattcccgcggcttcgatgactccaatagcaacaaggtcctggtgctcgcggcagagaaccagaacaagcagaaccgcacacctcatgagtggtttgggcacgatgagacgcgttggcaacagtttgtgtcctttgtcaccacaatgaaggtgagcaaaaagaaaaagggcctgctcctgaaaaggaacctggatgaagagcaggccgaggaattcagaagtcgccatctgaacgacactcggtacatcactaggtacatcaaatcatttatcgaggacaatttgcagtttcgcctggaggaaggcaaaaagcagtacgttcataccgttaacggtgcttacacctcccttatgcgcaagcgctggggcttcaacaagaacaggcaggagaacgatctgcaccatgccctggacgccgtgattatcgccgtcagcttgccgtttaagcaccgggtcagcgcttattttaagcgccgtgaagagtatgctcataaccagctgaaacgtgaacgtgagttctttcctgagccctggccaggctttgtgcatgagctcgaaatccgtatgatgcagaacgctgagaagatgaagctcggtctggagtccctggacctgaagacctatgacgagtcctttctccgcgaggtgcagcccatctttgtgagtaggatgccgaagagatccatcaagggtcagatccacgaggcgaccctcaagcgcgtgcgcgggaacactgaagatggatacatccggacggtgaaaaaggtccgtttggatcagattcctttcgataaaaacggagactttcctatgtttggaaaggaaaccgatatgaagacctacgaagctatcaagaaccgttatctggagtacaaaaaggataagaaaaaggccttcctggaacccctctataagccagccaagaaccctgagaatgcgcccattatccgctccgtaaagattgaggacaaggccaaccgcgtggttatgctggacgataagaccgctgccgataacgcgtcaatcgttaaaactgaagtgttccgccaccgcgagacaggtaagtttttcctgacacccatctacgtgagtgacgtgctctccaaccgtatcccagaaaagttcatcacacccgggaagccctactcccagtggaaggatattacagacgagtacgagtatctgttcgcactctaccccaacgacctcattagggtgaagatgcctaaggagaaggagaccaaaactaatatcggcgagaagcacgtgtggcaggaaaatttcatgtacttcaaaggtgtgcactcagctgacgccggcatcaaactgatcgaccacatgaactctttcgaggataaaatcggtacgcagcgtctggtggccttcgaaaaataccaagtggatccactgggcgagctgaccaaggtgcacggtgaaaaaaggcacggcatc

SEQ ID NO: 770 - DNA, 25 bp, Homo sapiens
  source 1..25: mol_type = other DNA
  misc_feature 1..25: note = LPG10165  BCL11A target
ccaattctccatcaccaagagagcc

SEQ ID NO: 771 - DNA, 25 bp, Homo sapiens
  source 1..25: mol_type = other DNA
  misc_feature 1..25: note = LPG10165  BCL11A target
gctaacagttgcttttatcacaggc

SEQ ID NO: 772 - DNA, 25 bp, Homo sapiens
  source 1..25: mol_type = other DNA
  misc_feature 1..25: note = LPG10165  BCL11A target
ccatacaggtaataacataggccag

SEQ ID NO: 773 - DNA, 25 bp, Homo sapiens
  source 1..25: mol_type = other DNA
  misc_feature 1..25: note = LPG10166  BCL11A target
cttagacataacacaccagggtcaa

SEQ ID NO: 774 - DNA, 25 bp, Homo sapiens
  source 1..25: mol_type = other DNA
  misc_feature 1..25: note = LPG10166  BCL11A target
gatatggcatctactcttagacata

SEQ ID NO: 775 - DNA, 25 bp, Homo sapiens
  source 1..25: mol_type = other DNA
  misc_feature 1..25: note = LPG10166  BCL11A target
gtccatacaggtaataacataggcc

SEQ ID NO: 776 - DNA, 25 bp, Homo sapiens
  source 1..25: mol_type = other DNA
  misc_feature 1..25: note = LPG10167/ LPG10168/ LPG10207 BCL11A target
gcactagactagcttcaaagttgta

SEQ ID NO: 777 - DNA, 25 bp, Homo sapiens
  source 1..25: mol_type = other DNA
  misc_feature 1..25: note = LPG10167/ LPG10168/ LPG10207 BCL11A target
cctaatcagaggccaaacccttcct

SEQ ID NO: 778 - DNA, 25 bp, Homo sapiens
  source 1..25: mol_type = other DNA
  misc_feature 1..25: note = LPG10167/ LPG10168/ LPG10207 BCL11A target
atggagaggtctgccagtcctcttc

SEQ ID NO: 779 - DNA, 25 bp, Homo sapiens
  source 1..25: mol_type = other DNA
  misc_feature 1..25: note = LPG10169 BCL11A target
gttattacctgtatggactttgcac

SEQ ID NO: 780 - DNA, 25 bp, Homo sapiens
  source 1..25: mol_type = other DNA
  misc_feature 1..25: note = LPG10169 BCL11A target
ttgggagttatctgtagtgagatgg

SEQ ID NO: 781 - DNA, 25 bp, Homo sapiens
  source 1..25: mol_type = other DNA
  misc_feature 1..25: note = LPG10169 BCL11A target
gtggactcccaaaattgtaaaggag

SEQ ID NO: 782 - DNA, 25 bp, Homo sapiens
  source 1..25: mol_type = other DNA
  misc_feature 1..25: note = LPG10171  BCL11A target
tgggcaaacggccaccgatggagag

SEQ ID NO: 783 - DNA, 25 bp, Homo sapiens
  source 1..25: mol_type = other DNA
  misc_feature 1..25: note = LPG10171  BCL11A target
tcagaggccaaacccttcctggagc

SEQ ID NO: 784 - DNA, 25 bp, Homo sapiens
  source 1..25: mol_type = other DNA
  misc_feature 1..25: note = LPG10171  BCL11A target
ctcttacttatgcacacctggggca

SEQ ID NO: 785 - DNA, 25 bp, Homo sapiens
  source 1..25: mol_type = other DNA
  misc_feature 1..25: note = LPG10186  BCL11A target
agagcagatagctgattccagtgca

SEQ ID NO: 786 - DNA, 25 bp, Homo sapiens
  source 1..25: mol_type = other DNA
  misc_feature 1..25: note = LPG10186  BCL11A target
tacaactttgaagctagtctagtgc

SEQ ID NO: 787 - DNA, 25 bp, Homo sapiens
  source 1..25: mol_type = other DNA
  misc_feature 1..25: note = LPG10186  BCL11A target
ctaatcagaggccaaacccttcctg

SEQ ID NO: 788 - DNA, 25 bp, Homo sapiens
  source 1..25: mol_type = other DNA
  misc_feature 1..25: note = LPG10190 BCL11A target
cactagactagcttcaaagttgtat

SEQ ID NO: 789 - DNA, 25 bp, Homo sapiens
  source 1..25: mol_type = other DNA
  misc_feature 1..25: note = LPG10190 BCL11A target
agagcagatagctgattccagtgca

SEQ ID NO: 790 - DNA, 25 bp, Homo sapiens
  source 1..25: mol_type = other DNA
  misc_feature 1..25: note = LPG10190 BCL11A target
cctatgttattacctgtatggactt

SEQ ID NO: 791 - DNA, 25 bp, Homo sapiens
  source 1..25: mol_type = other DNA
  misc_feature 1..25: note = LPG10191 BCL11A target
gattccagtgcaaagtccatacagg

SEQ ID NO: 792 - DNA, 25 bp, Homo sapiens
  source 1..25: mol_type = other DNA
  misc_feature 1..25: note = LPG10191 BCL11A target
tcttagacataacacaccagggtca

SEQ ID NO: 793 - DNA, 25 bp, Homo sapiens
  source 1..25: mol_type = other DNA
  misc_feature 1..25: note = LPG10191 BCL11A target
gcagacaggggaagcttcacctcct

SEQ ID NO: 794 - DNA, 25 bp, Homo sapiens
  source 1..25: mol_type = other DNA
  misc_feature 1..25: note = LPG10194  BCL11A target
gccgtgtggactcccaaaattgtaa

SEQ ID NO: 795 - DNA, 25 bp, Homo sapiens
  source 1..25: mol_type = other DNA
  misc_feature 1..25: note = LPG10194  BCL11A target
gaagcttcacctcctttacaatttt

SEQ ID NO: 796 - DNA, 25 bp, Homo sapiens
  source 1..25: mol_type = other DNA
  misc_feature 1..25: note = LPG10194  BCL11A target
gaagaggactggcagacctctccat

SEQ ID NO: 797 - DNA, 25 bp, Homo sapiens
  source 1..25: mol_type = other DNA
  misc_feature 1..25: note = LPG10195  BCL11A target
ctccatcaccaagagagccttccga

SEQ ID NO: 798 - DNA, 25 bp, Homo sapiens
  source 1..25: mol_type = other DNA
  misc_feature 1..25: note = LPG10195  BCL11A target
ccatgccgtgtggactcccaaaatt

SEQ ID NO: 799 - DNA, 25 bp, Homo sapiens
  source 1..25: mol_type = other DNA
  misc_feature 1..25: note = LPG10195  BCL11A target
agacaggggaagcttcacctccttt

SEQ ID NO: 800 - DNA, 25 bp, Homo sapiens
  source 1..25: mol_type = other DNA
  misc_feature 1..25: note = LPG10196 BCL11A target
gacaggggaagcttcacctccttta

SEQ ID NO: 801 - DNA, 25 bp, Homo sapiens
  source 1..25: mol_type = other DNA
  misc_feature 1..25: note = LPG10196 BCL11A target
gagtccacacggcatggcatacaaa

SEQ ID NO: 802 - DNA, 25 bp, Homo sapiens
  source 1..25: mol_type = other DNA
  misc_feature 1..25: note = LPG10196 BCL11A target
gactggcagacctctccatcggtgg

SEQ ID NO: 803 - DNA, 25 bp, Homo sapiens
  source 1..25: mol_type = other DNA
  misc_feature 1..25: note = LPG10197 BCL11A target
attctccatcaccaagagagccttc

SEQ ID NO: 804 - DNA, 25 bp, Homo sapiens
  source 1..25: mol_type = other DNA
  misc_feature 1..25: note = LPG10197 BCL11A target
ccatgccgtgtggactcccaaaatt

SEQ ID NO: 805 - DNA, 25 bp, Homo sapiens
  source 1..25: mol_type = other DNA
  misc_feature 1..25: note = LPG10197 BCL11A target
tttgtatgccatgccgtgtggactc

SEQ ID NO: 806 - DNA, 25 bp, Homo sapiens
  source 1..25: mol_type = other DNA
  misc_feature 1..25: note = LPG10198  BCL11A target
attgagaaataaaatccaattctcc

SEQ ID NO: 807 - DNA, 25 bp, Homo sapiens
  source 1..25: mol_type = other DNA
  misc_feature 1..25: note = LPG10198  BCL11A target
gagagccttccgaaagaggcccccc

SEQ ID NO: 808 - DNA, 25 bp, Homo sapiens
  source 1..25: mol_type = other DNA
  misc_feature 1..25: note = LPG10198  BCL11A target
gcaactgttagcttgcactagacta

SEQ ID NO: 809 - DNA, 25 bp, Homo sapiens
  source 1..25: mol_type = other DNA
  misc_feature 1..25: note = LPG10200  BCL11A target
gaggccaaacccttcctggagcctg

SEQ ID NO: 810 - DNA, 25 bp, Homo sapiens
  source 1..25: mol_type = other DNA
  misc_feature 1..25: note = LPG10200  BCL11A target
gaagaggactggcagacctctccat

SEQ ID NO: 811 - DNA, 25 bp, Homo sapiens
  source 1..25: mol_type = other DNA
  misc_feature 1..25: note = LPG10200  BCL11A target
attctccatcaccaagagagccttc

SEQ ID NO: 812 - DNA, 25 bp, Homo sapiens
  source 1..25: mol_type = other DNA
  misc_feature 1..25: note = LPG10203 BCL11A target
caagagagccttccgaaagaggccc

SEQ ID NO: 813 - DNA, 25 bp, Homo sapiens
  source 1..25: mol_type = other DNA
  misc_feature 1..25: note = LPG10203 BCL11A target
cctctccatcggtggccgtttgccc

SEQ ID NO: 814 - DNA, 25 bp, Homo sapiens
  source 1..25: mol_type = other DNA
  misc_feature 1..25: note = LPG10203 BCL11A target
ggctccaggaagggtttggcctctg

SEQ ID NO: 815 - DNA, 25 bp, Homo sapiens
  source 1..25: mol_type = other DNA
  misc_feature 1..25: note = LPG10204/ LPG10205/ LPG10208 BCL11A target
ctccaggaagggtttggcctctgat

SEQ ID NO: 816 - DNA, 25 bp, Homo sapiens
  source 1..25: mol_type = other DNA
  misc_feature 1..25: note = LPG10204/ LPG10205/ LPG10208 BCL11A target
agggtcaatacaactttgaagctag

SEQ ID NO: 817 - DNA, 25 bp, Homo sapiens
  source 1..25: mol_type = other DNA
  misc_feature 1..25: note = LPG10204/ LPG10205/ LPG10208 BCL11A target
ggagttatctgtagtgagatggctg

SEQ ID NO: 818 - DNA, 31 bp, synthetic construct
  source 1..31: mol_type = other DNA
  misc_feature 1..31: note = Human IDUA W402X
ggagcagctctaggccgaagtgtcgcaggcc

SEQ ID NO: 819 - DNA, 31 bp, synthetic construct
  source 1..31: mol_type = other DNA
  misc_feature 1..31: note = Mouse IDUA W392X
agaacaactctaggcagaggtctcaaaggct

SEQ ID NO: 820 - DNA, 31 bp, synthetic construct; identical to SEQ ID NO: 818
  source 1..31: mol_type = other DNA
  misc_feature 1..31: note = Humanized mouse IDUA

SEQ ID NO: 821 - RNA, 110 nt, synthetic construct
  source 1..110: mol_type = other RNA
  misc_feature 1..110: note = SGN001987
gcgcgagcacagctaaggccacggagttttagtactctgtaaaaagttacagaatctactaaaacaaggcaaaatgccgtgtttatctcgtcaacttgttggcgagattt

SEQ ID NO: 822 - RNA, 110 nt, synthetic construct
  source 1..110: mol_type = other RNA
  misc_feature 1..110: note = SGN001988
agtagcgcgagcacagctaaggccagttttagtactctgtaaaaagttacagaatctactaaaacaaggcaaaatgccgtgtttatctcgtcaacttgttggcgagattt

SEQ ID NO: 823 - RNA, 110 nt, synthetic construct
  source 1..110: mol_type = other RNA
  misc_feature 1..110: note = SGN001990
ctttctggcctggaggctatccagcgttttagtactctgtaaaaagttacagaatctactaaaacaaggcaaaatgccgtgtttatctcgtcaacttgttggcgagattt

SEQ ID NO: 824 - RNA, 110 nt, synthetic construct
  source 1..110: mol_type = other RNA
  misc_feature 1..110: note = SGN001991
ttagagtctctcagctggtacacgggttttagtactctgtaaaaagttacagaatctactaaaacaaggcaaaatgccgtgtttatctcgtcaacttgttggcgagattt

SEQ ID NO: 825 - RNA, 110 nt, synthetic construct
  source 1..110: mol_type = other RNA
  misc_feature 1..110: note = SGN001992
aggcagacagacttgtcactggattgttttagtactctgtaaaaagttacagaatctactaaaacaaggcaaaatgccgtgtttatctcgtcaacttgttggcgagattt

SEQ ID NO: 826 - DNA, 25 bp, synthetic construct
  source 1..25: mol_type = other DNA
  misc_feature 1..25: note = SGN001987 target sequence
gcgcgagcacagctaaggccacgga

SEQ ID NO: 827 - DNA, 25 bp, synthetic construct
  source 1..25: mol_type = other DNA
  misc_feature 1..25: note = SGN001988 target sequence
agtagcgcgagcacagctaaggcca

SEQ ID NO: 828 - DNA, 25 bp, synthetic construct
  source 1..25: mol_type = other DNA
  misc_feature 1..25: note = SGN001990 target sequence
ctttctggcctggaggctatccagc

SEQ ID NO: 829 - DNA, 25 bp, synthetic construct
  source 1..25: mol_type = other DNA
  misc_feature 1..25: note = SGN001991 target sequence
ttagagtctctcagctggtacacgg

SEQ ID NO: 830 - DNA, 25 bp, synthetic construct
  source 1..25: mol_type = other DNA
  misc_feature 1..25: note = SGN001992 target sequence
aggcagacagacttgtcactggatt

SEQ ID NO: 831 - DNA, 25 bp, synthetic construct
  source 1..25: mol_type = other DNA
  misc_feature 1..25: note = SGN005914 target sequence
gtacccagaaccagagccacattaa

SEQ ID NO: 832 - DNA, 25 bp, synthetic construct
  source 1..25: mol_type = other DNA
  misc_feature 1..25: note = SGN005915 target sequence
gctgcccaaatgaaaggagtgagag

SEQ ID NO: 833 - DNA, 25 bp, synthetic construct
  source 1..25: mol_type = other DNA
  misc_feature 1..25: note = SGN005917 target sequence
ctcagctagtcttcttcctccaacc

SEQ ID NO: 834 - DNA, 25 bp, synthetic construct
  source 1..25: mol_type = other DNA
  misc_feature 1..25: note = SGN005810 target sequence
gccgtgtgaaccatgtgactttgtc

SEQ ID NO: 835 - DNA, 25 bp, synthetic construct
  source 1..25: mol_type = other DNA
  misc_feature 1..25: note = SGN005814 target sequence
gaattgctatgtgtctgggtttcat

SEQ ID NO: 836 - DNA, 25 bp, synthetic construct
  source 1..25: mol_type = other DNA
  misc_feature 1..25: note = SGN005809 target sequence
gaaaaagatgagtatgcctgccgtg

SEQ ID NO: 837 - DNA, 25 bp, synthetic construct
  source 1..25: mol_type = other DNA
  misc_feature 1..25: note = SGN005811 target sequence
ctactctctctttctggcctggagg

SEQ ID NO: 838 - DNA, 25 bp, synthetic construct
  source 1..25: mol_type = other DNA
  misc_feature 1..25: note = SGN005812 target sequence
agtgtagtacaagagatagaaagac

SEQ ID NO: 839 - DNA, 25 bp, synthetic construct
  source 1..25: mol_type = other DNA
  misc_feature 1..25: note = SGN005813 target sequence
acacatagcaattcaggaaatttga

SEQ ID NO: 840 - DNA, 25 bp, synthetic construct
  source 1..25: mol_type = other DNA
  misc_feature 1..25: note = SGN005815 target sequence
aattcagtgtagtacaagagataga

SEQ ID NO: 841 - DNA, 25 bp, synthetic construct
  source 1..25: mol_type = other DNA
  misc_feature 1..25: note = SGN005920 target sequence
attaaccggccctgggaatataagg

SEQ ID NO: 842 - DNA, 25 bp, synthetic construct
  source 1..25: mol_type = other DNA
  misc_feature 1..25: note = SGN005822 target sequence
tttgcacatgcaaagtcagatttgt

SEQ ID NO: 843 - DNA, 25 bp, synthetic construct
  source 1..25: mol_type = other DNA
  misc_feature 1..25: note = SGN003670 target sequence
tgccgtgtaccagctgagagactct

SEQ ID NO: 844 - DNA, 25 bp, synthetic construct
  source 1..25: mol_type = other DNA
  misc_feature 1..25: note = SGN005817 target sequence
gtgcaaacgccttcaacaacagcat

SEQ ID NO: 845 - DNA, 25 bp, synthetic construct
  source 1..25: mol_type = other DNA
  misc_feature 1..25: note = SGN005819 target sequence
cttcaacaacagcattattccagaa

SEQ ID NO: 846 - DNA, 25 bp, synthetic construct
  source 1..25: mol_type = other DNA
  misc_feature 1..25: note = SGN005820 target sequence
caacaaatctgactttgcatgtgca

SEQ ID NO: 847 - DNA, 25 bp, synthetic construct
  source 1..25: mol_type = other DNA
  misc_feature 1..25: note = SGN005821 target sequence
atccagtgacaagtctgtctgccta

SEQ ID NO: 848 - DNA, 25 bp, synthetic construct
  source 1..25: mol_type = other DNA
  misc_feature 1..25: note = SGN005818 target sequence
acagcactgttgctcttgaagtcca

SEQ ID NO: 849 - DNA, 25 bp, synthetic construct
  source 1..25: mol_type = other DNA
  misc_feature 1..25: note = SGN005924 target sequence
taaggggggtaggggagctgcccaa

SEQ ID NO: 850 - DNA, 25 bp, synthetic construct
  source 1..25: mol_type = other DNA
  misc_feature 1..25: note = SGN005925 target sequence
ccctggaggcagcaaacatgctgtc

SEQ ID NO: 851 - DNA, 25 bp, synthetic construct
  source 1..25: mol_type = other DNA
  misc_feature 1..25: note = SGN005923 target sequence
ccaaatgaaaggagtgagaggtgac

SEQ ID NO: 852 - DNA, 25 bp, synthetic construct
  source 1..25: mol_type = other DNA
  misc_feature 1..25: note = SGN005926 target sequence
aaccagagccacattaaccggccct

SEQ ID NO: 853 - DNA, 25 bp, synthetic construct
  source 1..25: mol_type = other DNA
  misc_feature 1..25: note = SGN005843 target sequence
ttgtactacactgaattcaccccca

SEQ ID NO: 854 - DNA, 25 bp, synthetic construct
  source 1..25: mol_type = other DNA
  misc_feature 1..25: note = SGN005841 target sequence
tctctgctggatgacgtgagtaaac

SEQ ID NO: 855 - DNA, 25 bp, synthetic construct
  source 1..25: mol_type = other DNA
  misc_feature 1..25: note = SGN005783 target sequence
tcaggtttactcacgtcatccagca

SEQ ID NO: 856 - DNA, 25 bp, synthetic construct
  source 1..25: mol_type = other DNA
  misc_feature 1..25: note = SGN005838 target sequence
gtgtctgggtttcatccatccgaca

SEQ ID NO: 857 - DNA, 25 bp, synthetic construct
  source 1..25: mol_type = other DNA
  misc_feature 1..25: note = SGN005781 target sequence
gtaagtcaacttcaatgtcggatgg

SEQ ID NO: 858 - DNA, 25 bp, synthetic construct
  source 1..25: mol_type = other DNA
  misc_feature 1..25: note = SGN005775 target sequence
ggcatactcatctttttcagtgggg

SEQ ID NO: 859 - DNA, 25 bp, synthetic construct
  source 1..25: mol_type = other DNA
  misc_feature 1..25: note = SGN005599 target sequence
atccgacattgaagttgacttactg

SEQ ID NO: 860 - DNA, 25 bp, synthetic construct
  source 1..25: mol_type = other DNA
  misc_feature 1..25: note = SGN006003 target sequence
ttgccatattggacttggaaccaaa

SEQ ID NO: 861 - DNA, 25 bp, synthetic construct
  source 1..25: mol_type = other DNA
  misc_feature 1..25: note = SGN006001 target sequence
tcttctaaaggaagaacagaccccc

SEQ ID NO: 862 - DNA, 25 bp, synthetic construct
  source 1..25: mol_type = other DNA
  misc_feature 1..25: note = SGN006004 target sequence
tcctttagagttgccatattggact

SEQ ID NO: 863 - DNA, 25 bp, synthetic construct
  source 1..25: mol_type = other DNA
  misc_feature 1..25: note = SGN005998 target sequence
tattctggggggtctgttcttcctt

SEQ ID NO: 864 - DNA, 25 bp, synthetic construct
  source 1..25: mol_type = other DNA
  misc_feature 1..25: note = SGN005999 target sequence
gatcagctgatttataatcttctaa

SEQ ID NO: 865 - DNA, 25 bp, synthetic construct
  source 1..25: mol_type = other DNA
  misc_feature 1..25: note = SGN006002 target sequence
catggcctgtgccatcagtatctta

SEQ ID NO: 866 - DNA, 25 bp, synthetic construct
  source 1..25: mol_type = other DNA
  misc_feature 1..25: note = SGN006000 target sequence
cagctgatttataatcttctaaagg

SEQ ID NO: 867 - DNA, 25 bp, synthetic construct
  source 1..25: mol_type = other DNA
  misc_feature 1..25: note = SGN005773 target sequence
tccttactttgtgacacatttgttt

SEQ ID NO: 868 - DNA, 25 bp, synthetic construct
  source 1..25: mol_type = other DNA
  misc_feature 1..25: note = SGN005769 target sequence
ggtgtcttctggaataatgctgttg

SEQ ID NO: 869 - DNA, 25 bp, synthetic construct
  source 1..25: mol_type = other DNA
  misc_feature 1..25: note = SGN005771 target sequence
gctccaggccacagcactgttgctc

SEQ ID NO: 870 - DNA, 25 bp, synthetic construct
  source 1..25: mol_type = other DNA
  misc_feature 1..25: note = SGN005768 target sequence
ctgggctggggaagaaggtgtcttc

SEQ ID NO: 871 - DNA, 25 bp, synthetic construct
  source 1..25: mol_type = other DNA
  misc_feature 1..25: note = SGN005774 target sequence
cacatttgtttgagaatcaaaatcg

SEQ ID NO: 872 - DNA, 25 bp, synthetic construct
  source 1..25: mol_type = other DNA
  misc_feature 1..25: note = SGN005772 target sequence
acagttttgtctgtgatatacacat

SEQ ID NO: 873 - DNA, 25 bp, synthetic construct
  source 1..25: mol_type = other DNA
  misc_feature 1..25: note = SGN005770 target sequence
aacgccttcaacaacagcattattc

SEQ ID NO: 874 - DNA, 25 bp, synthetic construct
  source 1..25: mol_type = other DNA
  misc_feature 1..25: note = SGN005942 target sequence
gggacagataaaagtacccagaacc

SEQ ID NO: 875 - DNA, 25 bp, synthetic construct
  source 1..25: mol_type = other DNA
  misc_feature 1..25: note = SGN005948 target sequence
ttaaccggccctgggaatataaggt

SEQ ID NO: 876 - DNA, 25 bp, synthetic construct
  source 1..25: mol_type = other DNA
  misc_feature 1..25: note = SGN005945 target sequence
ctgcccaaatgaaaggagtgagagg

SEQ ID NO: 877 - DNA, 25 bp, synthetic construct
  source 1..25: mol_type = other DNA
  misc_feature 1..25: note = SGN005944 target sequence
aaaagtacccagaaccagagccaca

SEQ ID NO: 878 - DNA, 25 bp, synthetic construct
  source 1..25: mol_type = other DNA
  misc_feature 1..25: note = SGN005900 target sequence
acacatagcaattcaggaaatttga

SEQ ID NO: 879 - DNA, 25 bp, synthetic construct
  source 1..25: mol_type = other DNA
  misc_feature 1..25: note = SGN005904 target sequence
tccattctctgctggatgacgtgag

SEQ ID NO: 880 - DNA, 25 bp, synthetic construct
  source 1..25: mol_type = other DNA
  misc_feature 1..25: note = SGN005902 target sequence
gaattgctatgtgtctgggtttcat

SEQ ID NO: 881 - DNA, 25 bp, synthetic construct
  source 1..25: mol_type = other DNA
  misc_feature 1..25: note = SGN005906 target sequence
gaaagaccagtccttgctgaaagac

SEQ ID NO: 882 - DNA, 25 bp, synthetic construct
  source 1..25: mol_type = other DNA
  misc_feature 1..25: note = SGN005903 target sequence
gaaaaagatgagtatgcctgccgtg

SEQ ID NO: 883 - DNA, 25 bp, synthetic construct
  source 1..25: mol_type = other DNA
  misc_feature 1..25: note = SGN005905 target sequence
ccattctctgctggatgacgtgagt

SEQ ID NO: 884 - DNA, 25 bp, synthetic construct
  source 1..25: mol_type = other DNA
  misc_feature 1..25: note = SGN005901 target sequence
agtcaacttcaatgtcggatggatg

SEQ ID NO: 885 - DNA, 25 bp, synthetic construct
  source 1..25: mol_type = other DNA
  misc_feature 1..25: note = SGN006014 target sequence
tactgatggcacaggccatgccaac

SEQ ID NO: 886 - DNA, 25 bp, synthetic construct
  source 1..25: mol_type = other DNA
  misc_feature 1..25: note = SGN006012 target sequence
gcaccaaccccaacaactgtaatct

SEQ ID NO: 887 - DNA, 25 bp, synthetic construct
  source 1..25: mol_type = other DNA
  misc_feature 1..25: note = SGN006013 target sequence
agtccaatatggcaactctaaagga

SEQ ID NO: 888 - DNA, 25 bp, synthetic construct
  source 1..25: mol_type = other DNA
  misc_feature 1..25: note = SGN006015 target sequence
attataaatcagctgatcctttaga

SEQ ID NO: 889 - DNA, 25 bp, synthetic construct
  source 1..25: mol_type = other DNA
  misc_feature 1..25: note = SGN005907 target sequence
gtgcaaacgccttcaacaacagcat

SEQ ID NO: 890 - DNA, 25 bp, synthetic construct
  source 1..25: mol_type = other DNA
  misc_feature 1..25: note = SGN005908 target sequence
gctgagagactctaaatccagtgac

SEQ ID NO: 891 - DNA, 25 bp, synthetic construct
  source 1..25: mol_type = other DNA
  misc_feature 1..25: note = SGN005913 target sequence
caacagtgctgtggcctggagcaac

SEQ ID NO: 892 - DNA, 25 bp, synthetic construct
  source 1..25: mol_type = other DNA
  misc_feature 1..25: note = SGN005911 target sequence
ccaggccacagcactgttgctcttg

SEQ ID NO: 893 - DNA, 25 bp, synthetic construct
  source 1..25: mol_type = other DNA
  misc_feature 1..25: note = SGN005912 target sequence
agtcagatttgttgctccaggccac

SEQ ID NO: 894 - DNA, 25 bp, synthetic construct
  source 1..25: mol_type = other DNA
  misc_feature 1..25: note = SGN005909 target sequence
tgccgtgtaccagctgagagactct

SEQ ID NO: 895 - DNA, 25 bp, synthetic construct
  source 1..25: mol_type = other DNA
  misc_feature 1..25: note = SGN005910 target sequence
atccagtgacaagtctgtctgccta

SEQ ID NO: 896 - DNA, 25 bp, synthetic construct
  source 1..25: mol_type = other DNA
  misc_feature 1..25: note = SGN005312 target sequence
caggcatactcatctttttcagtgg

SEQ ID NO: 897 - DNA, 25 bp, synthetic construct
  source 1..25: mol_type = other DNA
  misc_feature 1..25: note = SGN005309 target sequence
agtagcgcgagcacagctaaggcca

SEQ ID NO: 898 - DNA, 25 bp, synthetic construct
  source 1..25: mol_type = other DNA
  misc_feature 1..25: note = SGN005313 target sequence
atgaaacccagacacatagcaattc

SEQ ID NO: 899 - DNA, 25 bp, synthetic construct
  source 1..25: mol_type = other DNA
  misc_feature 1..25: note = SGN005311 target sequence
gacaaagtcacatggttcacacggc

SEQ ID NO: 900 - DNA, 25 bp, synthetic construct
  source 1..25: mol_type = other DNA
  misc_feature 1..25: note = SGN005310 target sequence
ctgtgacaaagtcacatggttcaca

SEQ ID NO: 901 - DNA, 25 bp, synthetic construct
  source 1..25: mol_type = other DNA
  misc_feature 1..25: note = SGN005308 target sequence
gatttagagtctctcagctggtaca

SEQ ID NO: 902 - DNA, 25 bp, synthetic construct
  source 1..25: mol_type = other DNA
  misc_feature 1..25: note = SGN005306 target sequence
gacacatttgtttgagaatcaaaat

SEQ ID NO: 903 - DNA, 25 bp, synthetic construct
  source 1..25: mol_type = other DNA
  misc_feature 1..25: note = SGN005304 target sequence
ctgcccttacctgggctggggaaga

SEQ ID NO: 904 - DNA, 25 bp, synthetic construct
  source 1..25: mol_type = other DNA
  misc_feature 1..25: note = SGN005307 target sequence
tgtttgagaatcaaaatcggtgaat

SEQ ID NO: 905 - DNA, 25 bp, synthetic construct
  source 1..25: mol_type = other DNA
  misc_feature 1..25: note = SGN005305 target sequence
tcttctggaataatgctgttgttga

SEQ ID NO: 906 - DNA, 25 bp, synthetic construct
  source 1..25: mol_type = other DNA
  misc_feature 1..25: note = SGN005321 target sequence
gaaagagagagtagcgcgagcacag

SEQ ID NO: 907 - DNA, 25 bp, synthetic construct
  source 1..25: mol_type = other DNA
  misc_feature 1..25: note = SGN005322 target sequence
agtagcgcgagcacagctaaggcca

SEQ ID NO: 908 - DNA, 25 bp, synthetic construct
  source 1..25: mol_type = other DNA
  misc_feature 1..25: note = SGN005319 target sequence
ctttctggcctggaggctatccagc

SEQ ID NO: 909 - DNA, 25 bp, synthetic construct
  source 1..25: mol_type = other DNA
  misc_feature 1..25: note = SGN005323 target sequence
gcgagcacagctaaggccacggagc

SEQ ID NO: 910 - DNA, 25 bp, synthetic construct
  source 1..25: mol_type = other DNA
  misc_feature 1..25: note = SGN005320 target sequence
cacgctggatagcctccaggccaga

SEQ ID NO: 911 - DNA, 25 bp, synthetic construct
  source 1..25: mol_type = other DNA
  misc_feature 1..25: note = SGN005314 target sequence
ctgatcctcttgtcccacagatatc

SEQ ID NO: 912 - DNA, 25 bp, synthetic construct
  source 1..25: mol_type = other DNA
  misc_feature 1..25: note = SGN005316 target sequence
tcttgtcccacagatatccagaacc

SEQ ID NO: 913 - DNA, 25 bp, synthetic construct
  source 1..25: mol_type = other DNA
  misc_feature 1..25: note = SGN005317 target sequence
gaaccctgaccctgccgtgtaccag

SEQ ID NO: 914 - DNA, 25 bp, synthetic construct
  source 1..25: mol_type = other DNA
  misc_feature 1..25: note = SGN005315 target sequence
tgatcctcttgtcccacagatatcc

SEQ ID NO: 915 - DNA, 25 bp, synthetic construct
  source 1..25: mol_type = other DNA
  misc_feature 1..25: note = SGN005318 target sequence
ctgccgtgtaccagctgagagactc

SEQ ID NO: 916 - DNA, 25 bp, synthetic construct
  source 1..25: mol_type = other DNA
  misc_feature 1..25: note = SGN005341 target sequence
ttactcacgtcatccagcagagaat

SEQ ID NO: 917 - DNA, 25 bp, synthetic construct
  source 1..25: mol_type = other DNA
  misc_feature 1..25: note = SGN005342 target sequence
taagtcaacttcaatgtcggatgga

SEQ ID NO: 918 - DNA, 25 bp, synthetic construct
  source 1..25: mol_type = other DNA
  misc_feature 1..25: note = SGN005339 target sequence
actcacgctggatagcctccaggcc

SEQ ID NO: 919 - DNA, 25 bp, synthetic construct
  source 1..25: mol_type = other DNA
  misc_feature 1..25: note = SGN005343 target sequence
ttccattctctgctggatgacgtga

SEQ ID NO: 920 - DNA, 25 bp, synthetic construct
  source 1..25: mol_type = other DNA
  misc_feature 1..25: note = SGN005340 target sequence
cttttcccgatattcctcaggtact

SEQ ID NO: 921 - DNA, 25 bp, synthetic construct
  source 1..25: mol_type = other DNA
  misc_feature 1..25: note = SGN005336 target sequence
attttgattctcaaacaaatgtgtc

SEQ ID NO: 922 - DNA, 25 bp, synthetic construct
  source 1..25: mol_type = other DNA
  misc_feature 1..25: note = SGN005334 target sequence
cctgccgtgtaccagctgagagact

SEQ ID NO: 923 - DNA, 25 bp, synthetic construct
  source 1..25: mol_type = other DNA
  misc_feature 1..25: note = SGN005337 target sequence
gctgttgttgaaggcgtttgcacat

SEQ ID NO: 924 - DNA, 25 bp, synthetic construct
  source 1..25: mol_type = other DNA
  misc_feature 1..25: note = SGN005338 target sequence
actttgtgacacatttgtttgagaa

SEQ ID NO: 925 - DNA, 25 bp, synthetic construct
  source 1..25: mol_type = other DNA
  misc_feature 1..25: note = SGN005335 target sequence
tctgcctattcaccgattttgattc

SEQ ID NO: 926 - DNA, 25 bp, synthetic construct
  source 1..25: mol_type = other DNA
  misc_feature 1..25: note = SGN005346 target sequence
ccgattttgattctcaaacaaatgt

SEQ ID NO: 927 - DNA, 25 bp, synthetic construct
  source 1..25: mol_type = other DNA
  misc_feature 1..25: note = SGN005344 target sequence
ctgtctgcctattcaccgattttga

SEQ ID NO: 928 - DNA, 25 bp, synthetic construct
  source 1..25: mol_type = other DNA
  misc_feature 1..25: note = SGN005347 target sequence
aatgctgttgttgaaggcgtttgca

SEQ ID NO: 929 - DNA, 25 bp, synthetic construct
  source 1..25: mol_type = other DNA
  misc_feature 1..25: note = SGN005348 target sequence
cttactttgtgacacatttgtttga

SEQ ID NO: 930 - DNA, 25 bp, synthetic construct
  source 1..25: mol_type = other DNA
  misc_feature 1..25: note = SGN005345 target sequence
ctgcctattcaccgattttgattct

SEQ ID NO: 931 - DNA, 25 bp, synthetic construct
  source 1..25: mol_type = other DNA
  misc_feature 1..25: note = SGN005354 target sequence
tgatcctcttgtcccacagatatcc

SEQ ID NO: 932 - DNA, 25 bp, synthetic construct
  source 1..25: mol_type = other DNA
  misc_feature 1..25: note = SGN005355 target sequence
cttgtcccacagatatccagaaccc

SEQ ID NO: 933 - DNA, 25 bp, synthetic construct
  source 1..25: mol_type = other DNA
  misc_feature 1..25: note = SGN005356 target sequence
ctgaccctgccgtgtaccagctgag

SEQ ID NO: 934 - DNA, 25 bp, synthetic construct
  source 1..25: mol_type = other DNA
  misc_feature 1..25: note = SGN005357 target sequence
caaatgtgtcacaaagtaaggattc

SEQ ID NO: 935 - DNA, 25 bp, synthetic construct
  source 1..25: mol_type = other DNA
  misc_feature 1..25: note = SGN005358 target sequence
gtgctgtggcctggagcaacaaatc

SEQ ID NO: 936 - DNA, 25 bp, synthetic construct
  source 1..25: mol_type = other DNA
  misc_feature 1..25: note = SGN005359 target sequence
attcgggccgagatgtctcgctccg

SEQ ID NO: 937 - DNA, 25 bp, synthetic construct
  source 1..25: mol_type = other DNA
  misc_feature 1..25: note = SGN005360 target sequence
gagagactcacgctggatagcctcc

SEQ ID NO: 938 - DNA, 25 bp, synthetic construct
  source 1..25: mol_type = other DNA
  misc_feature 1..25: note = SGN005361 target sequence
actcacgctggatagcctccaggcc

SEQ ID NO: 939 - DNA, 25 bp, synthetic construct
  source 1..25: mol_type = other DNA
  misc_feature 1..25: note = SGN005362 target sequence
tccaggccagaaagagagagtagcg

SEQ ID NO: 940 - DNA, 25 bp, synthetic construct
  source 1..25: mol_type = other DNA
  misc_feature 1..25: note = SGN005363 target sequence
agagagagtagcgcgagcacagcta

SEQ ID NO: 941 - DNA, 25 bp, synthetic construct
  source 1..25: mol_type = other DNA
  misc_feature 1..25: note = SGN005364 target sequence
gaagacaccttcttccccagcccag

SEQ ID NO: 942 - DNA, 25 bp, synthetic construct
  source 1..25: mol_type = other DNA
  misc_feature 1..25: note = SGN005365 target sequence
atttagagtctctcagctggtacac

SEQ ID NO: 943 - DNA, 25 bp, synthetic construct
  source 1..25: mol_type = other DNA
  misc_feature 1..25: note = SGN005366 target sequence
agtctctcagctggtacacggcagg

SEQ ID NO: 944 - DNA, 25 bp, synthetic construct
  source 1..25: mol_type = other DNA
  misc_feature 1..25: note = SGN005367 target sequence
acggcagggtcagggttctggatat

SEQ ID NO: 945 - DNA, 25 bp, synthetic construct
  source 1..25: mol_type = other DNA
  misc_feature 1..25: note = SGN005373 target sequence
tagcctccaggccagaaagagagag

SEQ ID NO: 946 - DNA, 25 bp, synthetic construct
  source 1..25: mol_type = other DNA
  misc_feature 1..25: note = SGN005374 target sequence
agtagcgcgagcacagctaaggcca

SEQ ID NO: 947 - DNA, 25 bp, synthetic construct
  source 1..25: mol_type = other DNA
  misc_feature 1..25: note = SGN005376 target sequence
cgtgtaccagctgagagactctaaa

SEQ ID NO: 948 - DNA, 25 bp, synthetic construct
  source 1..25: mol_type = other DNA
  misc_feature 1..25: note = SGN005377 target sequence
agctgcccttacctgggctggggaa

SEQ ID NO: 949 - DNA, 25 bp, synthetic construct
  source 1..25: mol_type = other DNA
  misc_feature 1..25: note = SGN005378 target sequence
gtgacacatttgtttgagaatcaaa

SEQ ID NO: 950 - DNA, 25 bp, synthetic construct
  source 1..25: mol_type = other DNA
  misc_feature 1..25: note = SGN005379 target sequence
acacggcagggtcagggttctggat

SEQ ID NO: 951 - DNA, 25 bp, synthetic construct
  source 1..25: mol_type = other DNA
  misc_feature 1..25: note = SGN005380 target sequence
acagcattcgggccgagatgtctcg

SEQ ID NO: 952 - DNA, 25 bp, synthetic construct
  source 1..25: mol_type = other DNA
  misc_feature 1..25: note = SGN005381 target sequence
ccgagatgtctcgctccgtggcctt

SEQ ID NO: 953 - DNA, 25 bp, synthetic construct
  source 1..25: mol_type = other DNA
  misc_feature 1..25: note = SGN005382 target sequence
ctctctttctggcctggaggctatc

SEQ ID NO: 954 - DNA, 25 bp, synthetic construct
  source 1..25: mol_type = other DNA
  misc_feature 1..25: note = SGN005383 target sequence
tagcctccaggccagaaagagagag

SEQ ID NO: 955 - DNA, 25 bp, synthetic construct
  source 1..25: mol_type = other DNA
  misc_feature 1..25: note = SGN005384 target sequence
agtagcgcgagcacagctaaggcca

SEQ ID NO: 956 - DNA, 25 bp, synthetic construct
  source 1..25: mol_type = other DNA
  misc_feature 1..25: note = SGN005386 target sequence
cgtgtaccagctgagagactctaaa

SEQ ID NO: 957 - DNA, 25 bp, synthetic construct
  source 1..25: mol_type = other DNA
  misc_feature 1..25: note = SGN005387 target sequence
agctgcccttacctgggctggggaa

SEQ ID NO: 958 - DNA, 25 bp, synthetic construct
  source 1..25: mol_type = other DNA
  misc_feature 1..25: note = SGN005388 target sequence
gtgacacatttgtttgagaatcaaa

SEQ ID NO: 959 - DNA, 25 bp, synthetic construct
  source 1..25: mol_type = other DNA
  misc_feature 1..25: note = SGN005389 target sequence
acacggcagggtcagggttctggat

SEQ ID NO: 960 - DNA, 25 bp, synthetic construct
  source 1..25: mol_type = other DNA
  misc_feature 1..25: note = SGN005390 target sequence
acagcattcgggccgagatgtctcg

SEQ ID NO: 961 - DNA, 25 bp, synthetic construct
  source 1..25: mol_type = other DNA
  misc_feature 1..25: note = SGN005391 target sequence
ccgagatgtctcgctccgtggcctt

SEQ ID NO: 962 - DNA, 25 bp, synthetic construct
  source 1..25: mol_type = other DNA
  misc_feature 1..25: note = SGN005392 target sequence
ctctctttctggcctggaggctatc

SEQ ID NO: 963 - DNA, 25 bp, synthetic construct
  source 1..25: mol_type = other DNA
  misc_feature 1..25: note = SGN005393 target sequence
tagcctccaggccagaaagagagag

SEQ ID NO: 964 - DNA, 25 bp, synthetic construct
  source 1..25: mol_type = other DNA
  misc_feature 1..25: note = SGN005394 target sequence
agtagcgcgagcacagctaaggcca

SEQ ID NO: 965 - DNA, 25 bp, synthetic construct
  source 1..25: mol_type = other DNA
  misc_feature 1..25: note = SGN005396 target sequence
cgtgtaccagctgagagactctaaa

SEQ ID NO: 966 - DNA, 25 bp, synthetic construct
  source 1..25: mol_type = other DNA
  misc_feature 1..25: note = SGN005397 target sequence
agctgcccttacctgggctggggaa

SEQ ID NO: 967 - DNA, 25 bp, synthetic construct
  source 1..25: mol_type = other DNA
  misc_feature 1..25: note = SGN005398 target sequence
gtgacacatttgtttgagaatcaaa

SEQ ID NO: 968 - DNA, 25 bp, synthetic construct
  source 1..25: mol_type = other DNA
  misc_feature 1..25: note = SGN005399 target sequence
acacggcagggtcagggttctggat

SEQ ID NO: 969 - DNA, 25 bp, synthetic construct
  source 1..25: mol_type = other DNA
  misc_feature 1..25: note = SGN005400 target sequence
acagcattcgggccgagatgtctcg

SEQ ID NO: 970 - DNA, 25 bp, synthetic construct
  source 1..25: mol_type = other DNA
  misc_feature 1..25: note = SGN005401 target sequence
ccgagatgtctcgctccgtggcctt

SEQ ID NO: 971 - DNA, 25 bp, synthetic construct
  source 1..25: mol_type = other DNA
  misc_feature 1..25: note = SGN005402 target sequence
ctctctttctggcctggaggctatc

SEQ ID NO: 972 - DNA, 25 bp, synthetic construct
  source 1..25: mol_type = other DNA
  misc_feature 1..25: note = SGN005403 target sequence
tcttgtcccacagatatccagaacc

SEQ ID NO: 973 - DNA, 25 bp, synthetic construct
  source 1..25: mol_type = other DNA
  misc_feature 1..25: note = SGN005404 target sequence
tgccgtgtaccagctgagagactct

SEQ ID NO: 974 - DNA, 25 bp, synthetic construct
  source 1..25: mol_type = other DNA
  misc_feature 1..25: note = SGN005405 target sequence
tgatcctcttgtcccacagatatcc

SEQ ID NO: 975 - DNA, 25 bp, synthetic construct
  source 1..25: mol_type = other DNA
  misc_feature 1..25: note = SGN005406 target sequence
tttaggttcgtatctgtaaaaccaa

SEQ ID NO: 976 - DNA, 25 bp, synthetic construct
  source 1..25: mol_type = other DNA
  misc_feature 1..25: note = SGN005407 target sequence
cttgtcccacagatatccagaaccc

SEQ ID NO: 977 - DNA, 25 bp, synthetic construct
  source 1..25: mol_type = other DNA
  misc_feature 1..25: note = SGN005408 target sequence
cattcgggccgagatgtctcgctcc

SEQ ID NO: 978 - DNA, 25 bp, synthetic construct
  source 1..25: mol_type = other DNA
  misc_feature 1..25: note = SGN005409 target sequence
aagagagagtagcgcgagcacagct

SEQ ID NO: 979 - DNA, 25 bp, synthetic construct
  source 1..25: mol_type = other DNA
  misc_feature 1..25: note = SGN005410 target sequence
ggagagactcacgctggatagcctc

SEQ ID NO: 980 - DNA, 25 bp, synthetic construct
  source 1..25: mol_type = other DNA
  misc_feature 1..25: note = SGN005411 target sequence
tgacagcattcgggccgagatgtct

SEQ ID NO: 981 - DNA, 25 bp, synthetic construct
  source 1..25: mol_type = other DNA
  misc_feature 1..25: note = SGN005412 target sequence
ctccaaagattcaggtttactcacg

SEQ ID NO: 982 - DNA, 25 bp, synthetic construct
  source 1..25: mol_type = other DNA
  misc_feature 1..25: note = SGN005373 target sequence
tagcctccaggccagaaagagagag

SEQ ID NO: 983 - DNA, 25 bp, synthetic construct
  source 1..25: mol_type = other DNA
  misc_feature 1..25: note = SGN005374 target sequence
agtagcgcgagcacagctaaggcca

SEQ ID NO: 984 - DNA, 25 bp, synthetic construct
  source 1..25: mol_type = other DNA
  misc_feature 1..25: note = SGN005375 target sequence
ccacagatatccagaaccctgaccc

SEQ ID NO: 985 - DNA, 25 bp, synthetic construct
  source 1..25: mol_type = other DNA
  misc_feature 1..25: note = SGN005376 target sequence
cgtgtaccagctgagagactctaaa

SEQ ID NO: 986 - DNA, 25 bp, synthetic construct
  source 1..25: mol_type = other DNA
  misc_feature 1..25: note = SGN005377 target sequence
agctgcccttacctgggctggggaa

SEQ ID NO: 987 - DNA, 25 bp, synthetic construct
  source 1..25: mol_type = other DNA
  misc_feature 1..25: note = SGN005378 target sequence
gtgacacatttgtttgagaatcaaa

SEQ ID NO: 988 - DNA, 25 bp, synthetic construct
  source 1..25: mol_type = other DNA
  misc_feature 1..25: note = SGN005379 target sequence
acacggcagggtcagggttctggat

SEQ ID NO: 989 - DNA, 25 bp, synthetic construct
  source 1..25: mol_type = other DNA
  misc_feature 1..25: note = SGN005380 target sequence
acagcattcgggccgagatgtctcg

SEQ ID NO: 990 - DNA, 25 bp, synthetic construct
  source 1..25: mol_type = other DNA
  misc_feature 1..25: note = SGN005381 target sequence
ccgagatgtctcgctccgtggcctt

SEQ ID NO: 991 - DNA, 25 bp, synthetic construct
  source 1..25: mol_type = other DNA
  misc_feature 1..25: note = SGN005382 target sequence
ctctctttctggcctggaggctatc

SEQ ID NO: 992 - DNA, 25 bp, synthetic construct
  source 1..25: mol_type = other DNA
  misc_feature 1..25: note = SGN005782 target sequence
tttactcacgtcatccagcagagaa

SEQ ID NO: 993 - DNA, 25 bp, synthetic construct
  source 1..25: mol_type = other DNA
  misc_feature 1..25: note = SGN005777 target sequence
tggtctttctatctcttgtactaca

SEQ ID NO: 994 - DNA, 25 bp, synthetic construct
  source 1..25: mol_type = other DNA
  misc_feature 1..25: note = SGN005783 target sequence
tcaggtttactcacgtcatccagca

SEQ ID NO: 995 - DNA, 25 bp, synthetic construct
  source 1..25: mol_type = other DNA
  misc_feature 1..25: note = SGN005781 target sequence
gtaagtcaacttcaatgtcggatgg

SEQ ID NO: 996 - DNA, 25 bp, synthetic construct
  source 1..25: mol_type = other DNA
  misc_feature 1..25: note = SGN005776 target sequence
ggtgaattcagtgtagtacaagaga

SEQ ID NO: 997 - DNA, 25 bp, synthetic construct
  source 1..25: mol_type = other DNA
  misc_feature 1..25: note = SGN005776 target sequence
gaccagtccttgctgaaagacaagt

SEQ ID NO: 998 - DNA, 25 bp, synthetic construct
  source 1..25: mol_type = other DNA
  misc_feature 1..25: note = SGN005780 target sequence
atccgacattgaagttgacttactg

SEQ ID NO: 999 - DNA, 25 bp, synthetic construct
  source 1..25: mol_type = other DNA
  misc_feature 1..25: note = SGN005779 target sequence
aagttgacttactgaagaatggaga

SEQ ID NO: 1000 - DNA, 25 bp, synthetic construct
  source 1..25: mol_type = other DNA
  misc_feature 1..25: note = SGN005773 target sequence
tccttactttgtgacacatttgttt

SEQ ID NO: 1001 - DNA, 25 bp, synthetic construct
  source 1..25: mol_type = other DNA
  misc_feature 1..25: note = SGN005769 target sequence
ggtgtcttctggaataatgctgttg

SEQ ID NO: 1002 - DNA, 25 bp, synthetic construct
  source 1..25: mol_type = other DNA
  misc_feature 1..25: note = SGN005771 target sequence
gctccaggccacagcactgttgctc

SEQ ID NO: 1003 - DNA, 25 bp, synthetic construct
  source 1..25: mol_type = other DNA
  misc_feature 1..25: note = SGN005765 target sequence
gatgtcaagctggtcgagaaaagct

SEQ ID NO: 1004 - DNA, 25 bp, synthetic construct
  source 1..25: mol_type = other DNA
  misc_feature 1..25: note = SGN005766 target sequence
cttttctcgaccagcttgacatcac

SEQ ID NO: 1005 - DNA, 25 bp, synthetic construct
  source 1..25: mol_type = other DNA
  misc_feature 1..25: note = SGN005768 target sequence
ctgggctggggaagaaggtgtcttc

SEQ ID NO: 1006 - DNA, 25 bp, synthetic construct
  source 1..25: mol_type = other DNA
  misc_feature 1..25: note = SGN005774 target sequence
cacatttgtttgagaatcaaaatcg

SEQ ID NO: 1007 - DNA, 25 bp, synthetic construct
  source 1..25: mol_type = other DNA
  misc_feature 1..25: note = SGN005772 target sequence
acagttttgtctgtgatatacacat

SEQ ID NO: 1008 - DNA, 25 bp, synthetic construct
  source 1..25: mol_type = other DNA
  misc_feature 1..25: note = SGN005767 target sequence
aagttcctgtgatgtcaagctggtc

SEQ ID NO: 1009 - DNA, 25 bp, synthetic construct
  source 1..25: mol_type = other DNA
  misc_feature 1..25: note = SGN005770 target sequence
aacgccttcaacaacagcattattc

SEQ ID NO: 1010 - DNA, 23 bp, synthetic construct
  source 1..23: mol_type = other DNA
  misc_feature 1..23: note = SGN008751 target sequence
cgggccgagatgtctcgctccgt

SEQ ID NO: 1011 - DNA, 23 bp, synthetic construct
  source 1..23: mol_type = other DNA
  misc_feature 1..23: note = SGN008752 target sequence
ccttagctgtgctcgcgctactc

SEQ ID NO: 1012 - DNA, 23 bp, synthetic construct
  source 1..23: mol_type = other DNA
  misc_feature 1..23: note = SGN008753 target sequence
cttagctgtgctcgcgctactct

SEQ ID NO: 1013 - DNA, 23 bp, synthetic construct
  source 1..23: mol_type = other DNA
  misc_feature 1..23: note = SGN008754 target sequence
tttcatccatccgacattgaagt

SEQ ID NO: 1014 - DNA, 23 bp, synthetic construct
  source 1..23: mol_type = other DNA
  misc_feature 1..23: note = SGN008755 target sequence
gacaagtctgtctgcctattcac

SEQ ID NO: 1015 - DNA, 23 bp, synthetic construct
  source 1..23: mol_type = other DNA
  misc_feature 1..23: note = SGN008756 target sequence
aacaacagcattattccagaaga

SEQ ID NO: 1016 - DNA, 23 bp, synthetic construct
  source 1..23: mol_type = other DNA
  misc_feature 1..23: note = SGN008757 target sequence
tccatagacctcatgtctagcac

SEQ ID NO: 1017 - DNA, 23 bp, synthetic construct
  source 1..23: mol_type = other DNA
  misc_feature 1..23: note = SGN008758 target sequence
agaatccttactttgtgacacat

SEQ ID NO: 1018 - DNA, 23 bp, synthetic construct
  source 1..23: mol_type = other DNA
  misc_feature 1..23: note = SGN008759 target sequence
aataggcagacagacttgtcact

SEQ ID NO: 1019 - DNA, 23 bp, synthetic construct
  source 1..23: mol_type = other DNA
  misc_feature 1..23: note = SGN008760 target sequence
aaactttggctgataatattgca

SEQ ID NO: 1020 - DNA, 23 bp, synthetic construct
  source 1..23: mol_type = other DNA
  misc_feature 1..23: note = SGN008761 target sequence
aactttggctgataatattgcag

SEQ ID NO: 1021 - DNA, 23 bp, synthetic construct
  source 1..23: mol_type = other DNA
  misc_feature 1..23: note = SGN008762 target sequence
caggtctggggcaaatgatgaag

SEQ ID NO: 1022 - DNA, 23 bp, synthetic construct
  source 1..23: mol_type = other DNA
  misc_feature 1..23: note = SGN008763 target sequence
tattatcagccaaagtttcttca

SEQ ID NO: 1023 - DNA, 23 bp, synthetic construct
  source 1..23: mol_type = other DNA
  misc_feature 1..23: note = SGN008771 target sequence
tctagaactttgaccatcagagg

SEQ ID NO: 1024 - DNA, 23 bp, synthetic construct
  source 1..23: mol_type = other DNA
  misc_feature 1..23: note = SGN008772 target sequence
atgtcttttaggacttggcagat

SEQ ID NO: 1025 - DNA, 23 bp, synthetic construct
  source 1..23: mol_type = other DNA
  misc_feature 1..23: note = SGN008773 target sequence
tttaggacttggcagatgaactt

SEQ ID NO: 1026 - DNA, 23 bp, synthetic construct
  source 1..23: mol_type = other DNA
  misc_feature 1..23: note = SGN008774 target sequence
tggatctccaacatggcagcctt

SEQ ID NO: 1027 - DNA, 23 bp, synthetic construct
  source 1..23: mol_type = other DNA
  misc_feature 1..23: note = SGN008775 target sequence
gaaatcaacctttgccagagaca

SEQ ID NO: 1028 - DNA, 23 bp, synthetic construct
  source 1..23: mol_type = other DNA
  misc_feature 1..23: note = SGN008776 target sequence
tggagatccatcatctctccctt

SEQ ID NO: 1029 - DNA, 23 bp, synthetic construct
  source 1..23: mol_type = other DNA
  misc_feature 1..23: note = SGN008777 target sequence
atccatcatctctcccttcaatt

SEQ ID NO: 1030 - DNA, 23 bp, synthetic construct
  source 1..23: mol_type = other DNA
  misc_feature 1..23: note = SGN008778 target sequence
agccagagaggatcctgggaggg

SEQ ID NO: 1031 - DNA, 23 bp, synthetic construct
  source 1..23: mol_type = other DNA
  misc_feature 1..23: note = SGN008779 target sequence
cctctctggctccatcgtaagca

SEQ ID NO: 1032 - DNA, 23 bp, synthetic construct
  source 1..23: mol_type = other DNA
  misc_feature 1..23: note = SGN008780 target sequence
ctctctccttgccagaacctcta

SEQ ID NO: 1033 - DNA, 23 bp, synthetic construct
  source 1..23: mol_type = other DNA
  misc_feature 1..23: note = SGN008781 target sequence
ccccatttcctggagccatctct

SEQ ID NO: 1034 - DNA, 23 bp, synthetic construct
  source 1..23: mol_type = other DNA
  misc_feature 1..23: note = SGN008782 target sequence
attccttatctggtgacacaccc

SEQ ID NO: 1035 - DNA, 23 bp, synthetic construct
  source 1..23: mol_type = other DNA
  misc_feature 1..23: note = SGN008783 target sequence
acccccacctcctgttaggcaga

SEQ ID NO: 1036 - DNA, 23 bp, synthetic construct
  source 1..23: mol_type = other DNA
  misc_feature 1..23: note = SGN008784 target sequence
gcaactgttagcttgcactagac

SEQ ID NO: 1037 - DNA, 23 bp, synthetic construct
  source 1..23: mol_type = other DNA
  misc_feature 1..23: note = SGN008785 target sequence
gctagtctagtgcaagctaacag

SEQ ID NO: 1038 - DNA, 23 bp, synthetic construct
  source 1..23: mol_type = other DNA
  misc_feature 1..23: note = SGN008786 target sequence
tagtctagtgcaagctaacagtt

SEQ ID NO: 1039 - DNA, 23 bp, synthetic construct
  source 1..23: mol_type = other DNA
  misc_feature 1..23: note = SGN008787 target sequence
gagcctgtgataaaagcaactgt

SEQ ID NO: 1040 - RNA, 111 nt, synthetic construct
  source 1..111: mol_type = other RNA
  misc_feature 1..111: note = LPG10167_altv1 backbone
gtcatagttccattaaagccattaaagaatggctttgatgtttctatgataagggtttcggcccgtggcgttggggatcgcctgcccatttcaatgggcttctccccattt

SEQ ID NO: 1041 - RNA, 85 nt, synthetic construct
  source 1..85: mol_type = other RNA
  misc_feature 1..85: note = APG01604_altv1 backbone
gttttagtactctgtaaaaagttacagaatctactaaaacaaggcaaaatgccgtgtttatctcgtcaacttgttggcgagattt

SEQ ID NO: 1042 - RNA, 85 nt, synthetic construct
  source 1..85: mol_type = other RNA
  misc_feature 1..85: note = LPG10169_altv1 backbone
gttatagtactctgtaaaaagttacagaatctactataacaaggcaaaatgccgtgtttatctcgtcaacttgttggcgagattt

SEQ ID NO: 1043 - RNA, 138 nt, synthetic construct
  source 1..138: mol_type = other RNA
  misc_feature 1..138: note = LPG10171_altv1 backbone
gctatagttccataagaaacaaaggtttcttacgttactatagtaagggcaatgacccgtggcgtttggggatcgcctcatccattacggatattctccccatgtgaaaagcacctaagcataaggctaaggtgcttt

SEQ ID NO: 1044 - RNA, 96 nt, synthetic construct
  source 1..96: mol_type = other RNA
  misc_feature 1..96: note = LPG10186_altv1 backbone
gttatagtgtcatgttgaatagaaagctattcaacatggcaagttataataagctttatgcgtattcaaacttttgttaaggcgacatcgcctttt

SEQ ID NO: 1045 - RNA, 95 nt, synthetic construct
  source 1..95: mol_type = other RNA
  misc_feature 1..95: note = LPG10186_altv2 backbone
gttatagtgtcatgttgaatagaaagctattcaacatggcaagttataataagctttatgcgtattcaaacttttgttaaggcgacatcgccttt

SEQ ID NO: 1046 - DNA, 25 bp, synthetic construct
  source 1..25: mol_type = other DNA
  misc_feature 1..25: note = SGN005324 target sequence
gtgacaagtctgtctgcctattcac

SEQ ID NO: 1047 - DNA, 25 bp, synthetic construct
  source 1..25: mol_type = other DNA
  misc_feature 1..25: note = SGN005326 target sequence
agtccatagacctcatgtctagcac

SEQ ID NO: 1048 - DNA, 25 bp, synthetic construct
  source 1..25: mol_type = other DNA
  misc_feature 1..25: note = SGN005328 target sequence
tgaataggcagacagacttgtcact

SEQ ID NO: 1049 - DNA, 25 bp, synthetic construct
  source 1..25: mol_type = other DNA
  misc_feature 1..25: note = SGN005330 target sequence
ggccttagctgtgctcgcgctactc

SEQ ID NO: 1050 - DNA, 25 bp, synthetic construct
  source 1..25: mol_type = other DNA
  misc_feature 1..25: note = SGN005329 target sequence
ttcgggccgagatgtctcgctccgt

SEQ ID NO: 1051 - DNA, 25 bp, synthetic construct
  source 1..25: mol_type = other DNA
  misc_feature 1..25: note = SGN005333 target sequence
ggtttcatccatccgacattgaagt

SEQ ID NO: 1052 - DNA, 25 bp, synthetic construct
  source 1..25: mol_type = other DNA
  misc_feature 1..25: note = SGN005332 target sequence
gtcatccagcagagaatggaaagtc

SEQ ID NO: 1053 - DNA, 25 bp, synthetic construct
  source 1..25: mol_type = other DNA
  misc_feature 1..25: note = SGN005327 target sequence
tcagaatccttactttgtgacacat

SEQ ID NO: 1054 - DNA, 25 bp, synthetic construct
  source 1..25: mol_type = other DNA
  misc_feature 1..25: note = SGN005331 target sequence
gccttagctgtgctcgcgctactct

1. A nucleic acid molecule comprising a polynucleotide encoding an RNA-guided nuclease (RGN) polypeptide comprising an amino acid sequence having at least 90% sequence identity to any one of SEQ ID NOs: 19, 13, 3, 7, 16, 1, 2, 4-6, 8-12, 14, 15, 17, 18, and 20.

2. (canceled)

3. The nucleic acid molecule of claim 1, wherein said polynucleotide encoding an RGN polypeptide is:
a) operably linked to a promoter heterologous to said polynucleotide; and/or
b) codon optimized for expression in a eukaryotic cell.

4. The nucleic acid molecule of claim 1, wherein said RGN polypeptide comprises the amino acid sequence set forth as any one of SEQ ID NOs: 19, 13, 3, 7, 16, 1, 2, 4-6, 8-12, 14, 15, 17, 18, and 20.

5.-7. (canceled)

8. The nucleic acid molecule of claim 1, wherein said RGN polypeptide:
a) is nuclease inactive or is a nickase; and/or
b) comprises one or more nuclear localization signals.

9. The nucleic acid molecule of claim 1, wherein the RGN polypeptide is operably fused to a base-editing polypeptide.

10. The nucleic acid molecule of claim 9, wherein the base-editing polypeptide is a deaminase.

11.-13. (canceled)

14. A vector comprising the nucleic acid molecule of claim 1.

15. The vector of claim 14, further comprising at least one nucleotide sequence encoding a gRNA capable of hybridizing to the non-target strand of said target sequence.

16.-19. (canceled)

20. A cell comprising the nucleic acid molecule of claim 1.

21.-29. (canceled)

30. An RNA-guided nuclease (RGN) polypeptide, wherein said RGN polypeptide comprises an amino acid sequence having at least 90% sequence identity to any one of SEQ ID NOs: 19, 13, 3, 7, 16, 1, 2, 4-6, 8-12, 14, 15, 17, 18, and 20.

31. (canceled)

32. The RGN polypeptide of claim 30, wherein said RGN polypeptide comprises the amino acid sequence set forth as any one of SEQ ID NOs: 19, 13, 3, 7, 16, 1, 2, 4-6, 8-12, 14, 15, 17, 18, and 20.

33.-35. (canceled)

36. The RGN polypeptide of claim 30, wherein said RGN polypeptide:
a) is nuclease inactive or a nickase; and/or
b) comprises one or more nuclear localization signals.

37. The RGN polypeptide of claim 30, wherein the RGN polypeptide is operably fused to a base-editing polypeptide.

38. The RGN polypeptide of claim 37, wherein the base-editing polypeptide is a deaminase.

39.-40. (canceled)

41. A ribonucleoprotein (RNP) complex comprising the RGN polypeptide of claim 30 and a guide RNA bound to the RGN polypeptide.

42.-66. (canceled)

67. A system for binding a target sequence in a target nucleic acid molecule, wherein said target sequence comprises a target strand and a non-target strand, said system comprising:
a) one or more guide RNAs capable of hybridizing to the non-target strand of said target sequence or one or more polynucleotides comprising one or more nucleotide sequences encoding the one or more guide RNAs (gRNAs); and
b) an RNA-guided nuclease (RGN) polypeptide comprising an amino acid sequence having at least 90% sequence identity to any one of SEQ ID NOs: 19, 13, 3, 7, 16, 1, 2, 4-6, 8-12, 14, 15, 17, 18, and 20, or a polynucleotide comprising a nucleotide sequence encoding the RGN polypeptide.

68. The system of claim 67, wherein:
a) at least one of said nucleotide sequences encoding the one or more guide RNAs and said nucleotide sequence encoding the RGN polypeptide is operably linked to a promoter heterologous to said nucleotide sequence; and/or
b) said nucleotide sequence encoding the RGN polypeptide is codon optimized for expression in a eukaryotic cell.

69.-70. (canceled)

71. The system of claim 67, wherein said RGN polypeptide comprises the amino acid sequence set forth as any one of SEQ ID NOs: 19, 13, 3, 7, 16, 1, 2, 4-6, 8-12, 14, 15, 17, 18, and 20.

72. (canceled)

73. The system of claim 67, wherein said target sequence is a eukaryotic target sequence.

74.-75. (canceled)

76. The system of claim 67, wherein said gRNA is selected from the group consisting of:
a) a gRNA comprising a CRISPR repeat having at least 90% sequence identity to SEQ ID NO: 40 and a tracrRNA having at least 90% sequence identity to SEQ ID NO: 61, wherein said RGN polypeptide comprises an amino acid sequence having at least 90% sequence identity to SEQ ID NO: 19;
b) a gRNA comprising a CRISPR repeat having at least 90% sequence identity to SEQ ID NO: 33 and a tracrRNA having at least 90% sequence identity to SEQ ID NO: 54, wherein said RGN polypeptide comprises an amino acid sequence having at least 90% sequence identity to SEQ ID NO: 13;
c) a gRNA comprising a CRISPR repeat having at least 90% sequence identity to SEQ ID NO: 23 and a tracrRNA having at least 90% sequence identity to SEQ ID NO: 44 or nucleotides 19-111 of SEQ ID NO: 1040, wherein said RGN polypeptide comprises an amino acid sequence having at least 90% sequence identity to SEQ ID NO: 3;
d) a gRNA comprising a CRISPR repeat having at least 90% sequence identity to SEQ ID NO: 27 or nucleotides 1-22 of SEQ ID NO: 1044 or 1045, and a tracrRNA having at least 90% sequence identity to SEQ ID NO: 48 or nucleotides 27-96 of SEQ ID NO 1044 or nucleotides 27-95 of SEQ ID NO: 1045, wherein said RGN polypeptide comprises an amino acid sequence having at least 90% sequence identity to SEQ ID NO: 7;
e) a 9RNA comprising a CRISPR repeat having at least 90% sequence identity to SEQ ID NO: 36 and a tracrRNA having at least 90% sequence identity to SEQ ID NO: 57, wherein said RGN polypeptide comprises an amino acid sequence having at least 90% sequence identity to SEQ ID NO: 16;
f) a gRNA comprising a CRISPR repeat having at least 90% sequence identity to SEQ ID NO: 21 and a tracrRNA having at least 90% sequence identity to SEQ ID NO: 42, wherein said RGN polypeptide comprises an amino acid sequence having at least 90% sequence identity to SEQ ID NO: 1;
g) a gRNA comprising a CRISPR repeat having at least 90% sequence identity to SEQ ID NO: 22 and a tracrRNA having at least 90% sequence identity to SEQ ID NO: 43, wherein said RGN polypeptide comprises an amino acid sequence having at least 90% sequence identity to SEQ ID NO: 2;
h) a gRNA comprising a CRISPR repeat having at least 90% sequence identity to SEQ ID NO: 24 and a tracrRNA having at least 90% sequence identity to SEQ ID NO: 45, wherein said RGN polypeptide comprises an amino acid sequence having at least 90% sequence identity to SEQ ID NO: 4;
i) a gRNA comprising a CRISPR repeat having at least 90% sequence identity to SEQ ID NO: 25 or nucleotides 1-17 of SEQ ID NO: 1041 or 1042, and a tracrRNA having at least 90% sequence identity to SEQ ID NO: 46 or nucleotides 22-85 of SEQ ID NO: 1041 or 1042, wherein said RGN polypeptide comprises an amino acid sequence having at least 90% sequence identity to SEQ ID NO: 5;
j) a gRNA comprising a CRISPR repeat having at least 90% sequence identity to SEQ ID NO: 26 and a tracrRNA having at least 90% sequence identity to SEQ ID NO: 47 or nucleotides 24-138 of SEQ ID NO: 1043, wherein said RGN polypeptide comprises an amino acid sequence having at least 90% sequence identity to SEQ ID NO: 6;
k) a gRNA comprising a CRISPR repeat having at least 90% sequence identity to SEQ ID NO: 28 and a tracrRNA having at least 90% sequence identity to SEQ ID NO: 49, wherein said RGN polypeptide comprises an amino acid sequence having at least 90% sequence identity to SEQ ID NO: 8;
l) a gRNA comprising a CRISPR repeat having at least 90% sequence identity to SEQ ID NO: 29 and a tracrRNA having at least 90% sequence identity to SEQ ID NO: 50, wherein said RGN polypeptide comprises an amino acid sequence having at least 90% sequence identity to SEQ ID NO: 9;
m) a gRNA comprising a CRISPR repeat having at least 90% sequence identity to SEQ ID NO: 30 and a tracrRNA having at least 90% sequence identity to SEQ ID NO: 51, wherein said RGN polypeptide comprises an amino acid sequence having at least 90% sequence identity to SEQ ID NOs:10;
n) a gRNA comprising a CRISPR repeat having at least 90% sequence identity to SEQ ID NO: 31 and a tracrRNA having at least 90% sequence identity to SEQ ID NO: 52, wherein said RGN polypeptide comprises an amino acid sequence having at least 90% sequence identity to SEQ ID NO: 11;
o) a gRNA comprising a CRISPR repeat having at least 90% sequence identity to SEQ ID NO: 32 and a tracrRNA having at least 90% sequence identity to SEQ ID NO: 53, wherein said RGN polypeptide comprises an amino acid sequence having at least 90% sequence identity to SEQ ID NO: 12;
p) a gRNA comprising a CRISPR repeat having at least 90% sequence identity to SEQ ID NO: 34 and a tracrRNA having at least 90% sequence identity to SEQ ID NO: 55, wherein said RGN polypeptide comprises an amino acid sequence having at least 90% sequence identity to SEQ ID NO: 14;
q) a gRNA comprising a CRISPR repeat having at least 90% sequence identity to SEQ ID NO: 35 and a tracrRNA having at least 90% sequence identity to SEQ ID NO: 56, wherein said RGN polypeptide comprises an amino acid sequence having at least 90% sequence identity to SEQ ID NO: 15;
r) a gRNA comprising a CRISPR repeat having at least 90% sequence identity to SEQ ID NO: 36 and a tracrRNA having at least 90% sequence identity to SEQ ID NO: 57, wherein said RGN polypeptide comprises an amino acid sequence having at least 90% sequence identity to SEQ ID NO: 16;
s) a gRNA comprising a CRISPR repeat having at least 90% sequence identity to SEQ ID NO: 37 and a tracrRNA having at least 90% sequence identity to SEQ ID NO: 58, wherein said RGN polypeptide comprises an amino acid sequence having at least 90% sequence identity to SEQ ID NO: 17;
t) a gRNA comprising a CRISPR repeat having at least 90% sequence identity to SEQ ID NO: 41 and a tracrRNA having at least 90% sequence identity to SEQ ID NO: 62, wherein said RGN polypeptide comprises an amino acid sequence having at least 90% sequence identity to SEQ ID NO: 20.

77.-82. (canceled)

83. The system of claim 67, wherein said RGN polypeptide:
a) is nuclease inactive or is a nickase; and/or
b) is operably linked to a base-editing polypeptide.

84.-87. (canceled)

88. The system of claim 67, wherein said system further comprises one or more donor polynucleotides.

89.-92. (canceled)

93. A method for binding a target sequence in a target nucleic acid molecule comprising delivering a system according to claim 67, to said target sequence or a cell comprising the target sequence.

94.-106. (canceled)

107. A method for cleaving and/or modifying a target nucleic acid molecule comprising a target sequence, wherein said target sequence comprises a target strand and a non-target strand, said method comprising contacting the target nucleic acid molecule with:
a) an RNA-guided nuclease (RGN) polypeptide, wherein said RGN comprises an amino acid sequence having at least 90% sequence identity to any one of SEQ ID NOs: 19, 13, 3, 7, 16, 1, 2, 4-6, 8-12, 14, 15, 17, 18, and 20; and
b) one or more guide RNAs capable of targeting the RGN of (a) to the target sequence;
wherein the one or more guide RNAs hybridize to the non-target strand of the target sequence, thereby directing said RGN polypeptide to bind to said target nucleic acid molecule and cleavage and/or modification of said target nucleic acid molecule occurs.

108.-143. (canceled)
